(19) United States
(12) Patent Application Publication
(10) Pub. No.: US 2025/0026813 A1
(43) Pub. Date: Jan. 23, 2025

(54) ANTIBODIES AGAINST SARS-COV-2 AND USES THEREOF

(71) Applicant: Kymab Limited, Cambridge (GB)

(72) Inventors: Paul Kellam, Cambridge (GB); Anne Palser, Cambridge (GB); Volker Germaschewski, Cambridge (GB); Simon James Watson, Cambridge (GB); Benjamin David Grimshaw, Cambridge (GB); Spela Binter, Cambridge (GB); Jaroslaw Michal Szary, Cambridge (GB); Margot Billaud, Cambridge (GB); Robert Rowlands, Cambridge (GB); Aishwarya Krishna, Cambridge (GB); Huan-Chun Lin, Cambridge (GB); Cheng-Yuan Yang, Cambridge (GB); Li-Ying Liou, Cambridge (GB)

(21) Appl. No.: 18/250,716

(22) PCT Filed: Oct. 27, 2021
(86) PCT No.: PCT/EP2021/079901

§ 371 Date: Apr. 26, 2023

(30) Foreign Application Priority Data
Oct. 27, 2020 (GB) 2017058.5

(51) Int. Cl. C07K 16/10

(52) U.S. Cl. CPC C07K 16/1003; C07K 2317/24; C07K 2317/76; C07K 2317/92

(57) ABSTRACT

The present invention relates to antibodies that are specific for SARS-CoV-2. The present invention also provides methods of treatment, uses, pharmaceutical compositions and kits comprising the antibodies.

### FIELD OF THE INVENTION

[0001] The present invention relates to antibodies that bind the spike protein (S) of Severe acute respiratory syndrome coronavirus 2 (SARS-CoV-2) the strain of coronavirus that causes pandemic coronavirus infectious disease 2019 (COVID-19), and their use in diagnosis, prevention and treatment of SARS-CoV-2 related diseases, particularly COVID-19.

### BACKGROUND

[0002] The new pandemic coronavirus, Severe Acute Respiratory Syndrome Coronavirus 2 (SARS-CoV-2) emerged into humans in China sometime between October to November 2019, and the disease Coronavirus Infectious Disease-2019 (COVID-19) was identified in China in December 2019. SARS-CoV-2 causes COVID-19 in humans. Although an asymptomatic or mild infection in many people, the virus can cause severe respiratory disease and death in a significant number of people, especially in the elderly and in those with underlying co-morbidities. Initial recognition of a new human pneumonia, negative for all known human respiratory pathogens, occurred by recognition of related symptoms in hospitals in Wuhan, China, together with a common epidemiological link to a ‘wet market’ in Wuhan. Rapid identification of a new coronavirus genome, and the development of specific and sensitive virus detection diagnostics lead to the recognition of the explosive spread of the virus in Wuhan, followed by other regions of China and surrounding neighbouring countries.

[0003] As of 2 Sep. 2020, SARS-CoV-2 has spread throughout the world infecting an estimated ˜25 million people, resulting in 861,000 deaths, yielding a nominal infection fatality rate (IFR) of ˜3%. This number is likely an overestimate, due to hidden, asymptomatic or mild, and non-diagnosed cases. Although the true infection fatality rate is difficult to calculate, current estimates range from 0.1-1%.

[0004] COVID-19 can be a mild to moderate self-limiting disease in about 80% of infected people. These people experience symptoms of fever, myalgia, dry persistent cough and shortness of breath. This disease course is usually complete in 7-10 days, but recovery to full health may take longer. However, in −20% of cases, a more aggressive and severe disease occurs, either with rapid progression from symptom onset or a rapid decline from the initial 7-10 days of moderate infection when recovery was apparently beginning. Such serious disease is associated with lymphopenia, elevated troponin and D-dimer levels in the blood and both consolidated or diffuse bilateral (both lungs) ‘ground glass’ pneumonia. Many of these cases require breathing support and ˜20-25% of the serious cases become critically ill. The IFR for critical patients is historically ˜40%-50%, consistent with the overall IFR of 1-2 people per 100 diagnosed as infected. Recently, the long-term consequences of infection by SARS-CoV-2 are becoming apparent, so-called Long-COVID, characterised by recurring symptoms experienced by patients, regardless of whether they were hospitalised, affecting the respiratory system, the brain, cardiovascular system and heart, the kidneys, the gut, the liver, and the skin. The symptoms can range in intensity and duration and are estimated to affect 10-15% of people recovered from their initial infection.

[0005] SARS-CoV-2 is a beta coronavirus, closely related to the 2002 SARS-CoV. SARS-CoV of 2002 infected 8,098 people causing 774 deaths (IFR 9.5%). SARS-CoV has not been seen since 2004 and was controlled by aggressive infection control measures and quarantining.

[0006] The more distantly related beta coronavirus Middle East Respiratory Syndrome coronavirus (MERS-CoV), emerged in Saudi Arabia in 2012. Infections with MERS-CoV continue to occur in the Middle East, as a result of ongoing zoonotic (animal to human) infection from camels, the reservoir animal species, to humans. MERS-CoV as an IRF of 35% and since April 2012, more than 2,400 cases of Middle East respiratory syndrome coronavirus (MERS-CoV) have been detected in 27 countries.

[0007] SARS-CoV-2, SARS-CoV and MERS-CoV represent epidemic/pandemic coronavirus. However, four endemic coronaviruses (NL63, 229E, OC43 and HKU1) also infect humans in childhood and throughout adult life, causing mild upper respiratory tract infections but occasionally causing severe life-threatening disease. Current opinion suggests SARS-CoV-2 is on the path to becoming the 5^{th} seasonal endemic human coronavirus.

[0008] The major components of the SARS-CoV-2 virus particle are its externally-oriented spike protein and its virus RNA genome which is wrapped in nucleocapsid proteins. The spike protein is a trimeric virus protein embedded in the lipid membrane of the virus particle. Viral infection is initiated when the spike protein binds to the cellular Angiotensin Converting Enzyme 2 (ACE2) receptor resulting in internalisation of the virus into the cell. The most likely path for the viruses into the cell is via receptor mediated cellular uptake into the endosomal pathway of the cell, where the virus encounters an activating cellular protease (cathepsin). This cell enzyme proteolytically cleaves the spike triggering a membrane fusion event between the virus lipid envelope and the lipid shell of the endosome, resulting in the entry of the virus genome into the cell cytoplasm. Once in the cell cytoplasm, the virus begins the process of making multiple new copies of its genome, whilst simultaneously making new copies of virus proteins. These new proteins and genomes assemble into virus particles where they bud into a structure of the cell called the endoplasmic reticulum, which pinches off into small vesicles for transport to the cell surface where new virus particles are released to the outside of the infected cell. These new virus particles are then free to infect more cells. In addition, the presence of TMPRSS2 on the cell surface can proteolytically cleave the spike after ACE-2 binding triggering a membrane fusion at the plasma membrane.

[0009] The virus life cycle provides points of chemotherapeutic intervention. Currently the only directly acting antiviral (DAA) is remdesivir (Gilead), an adenosine nucleotide analogue which inhibits the virus RNA dependent RNA polymerase, the enzyme that replicates the virus genome. The clinical utility of remdesivir is not clear and experience with antiviral drugs to other respiratory pathogens such as influenza A virus and respiratory syncytial virus (RSV), suggest that drugs like remdesivir have restricted use, being optimal in efficacy if taken very early in infection. This is almost impossible to achieve in practice with SARS-CoV-2 as the person is not symptomatic at the time of infection when this drug will have greatest impact. Therefore, potentially remdesivir's activity profile will prove to be similar to the influenza A drugs, oseltamivir and zanamivir, where their effect on severe disease is limited, and the chemoprophylaxis of case contacts is limited without mass deployment into people's homes, something unlikely to happen with a new drug like remdesivir, with a limited safety profile. Other small molecule antiviral drugs are expected to emerge as research proceeds. In particular, the virus protease is an attractive target. However, such inhibitors are all likely to suffer from a restricted optimal efficacy window, which in most case occurs before or at the time of symptom onset.

[0010] Clinical management of serious disease is the subject of ongoing and planned clinical trials, which have already shown a number of failures and one success. For example, hydroxychloroquine, an anti-malarial drug similar to chloroquine, has failed to show clinical effect in a number of clinical trials. In addition, the anti-IL6 receptor antibody tocilizumab (Genentech), used for the treatment of cytokine release syndrome (CRS) and of sarilumab (anti-IL6 receptor antibody, Regeneron) have failed to show clinical efficacy. However, dexamethasone, a steroidal anti-inflammatory drug has shown clinical efficacy in treating severe COVID-19.

[0011] Changes in the critical care of patients will also have effects, either through the scaling of access to ventilators (surge capacity) or the provision of continuous positive airway pressure (CPAP) as a form of respiratory support. CPAP is reported to have a positive clinical effect on the ability of people to survive severe COVID-19 without the need for full ventilation. Further, the proning of ventilated patients improves the clinical course of disease.

[0012] The normal course of an infectious disease process is:
[0013] 1. Infection,
[0014] 2. Virus replication in the body with the innate immune response providing the system that non-specifically attempts to limit early uncontrolled replication,
[0015] 3. Initiation of the adaptive immune response that drives within the body the production of B cells and T cells specific to the new virus infection,
[0016] 4. Virus specific B cells expand in the body and secrete antibodies, their effector molecules.
[0017] 5. Virus specific T cells expand in the body to kill infected cells,

[0018] Infection by SARS-CoV-2 results in an adaptive immune response, with induction of antibodies and T cells which specifically bind virus proteins. The adaptive immune system begins to have a meaningful effect on controlling the infection within about 7-10 days from the point of virus replication in the body, reaching its peak activity around 10-14 days.

### Spike Protein

[0019] The spike protein is a trimer of three monomers. Each monomer is about 180 kDa, and contains two subunits, S1 and S2, mediating attachment and membrane fusion, respectively. The N- and C-terminal portions of S1 fold as independent domains, the N-terminal domain (NTD), the receptor binding domain (RBD) and the C-terminal domain (C-domain) which associates with the S2 subunit. FIG. 1 depicts a single monomer of the trimeric spike protein. The monomer is translated as a single polypeptide which is proteolytically cleaved into the subunits S1 and S2 which non-covalently associate. The amino acid sequence of the wild-type SARS-CoV-2 spike protein is provided in FIG. 2A and the amino acid sequence of the SARS-CoV-2 spike protein containing double proline (PP) mutations (K986 and V987) (as compared to wild-type) is provided in FIG. 2B.

[0020] Coronavirus S proteins are typical class I viral fusion proteins, and protease cleavage is required for activation of the fusion potential of the S protein. In a two-step sequential protease cleavage model, as is thought to occur for SARS-CoV-2, a priming cleavage occurs between S1 and S2 and activating cleavage occurs at the S2′ cleavage site. Further the RBD of each trimer is dynamic, existing in either an ‘UP’ or ‘DOWN’ configuration. The UP state is required for ACE2 receptor binding. Therefore, a trimeric spike can exist with all 3 RBD DOWN, 2 DOWN and 1 UP, 1 DOWN and 2 UP or all 3 RBDs UP. Each RBD in the trimer is able to bind ACE2 in its UP state and initiate infection.

### SUMMARY OF THE INVENTION

[0021] We have discovered monoclonal antibodies that bind the spike protein of SARS-CoV-2 and have properties suitable for development as medicaments for treating or preventing viral infection. Monoclonal antibodies of the invention demonstrate a combination of advantageous properties, including binding location on the spike protein of SARS-CoV-2, binding affinity to the spike protein of SARS-CoV-2 and/or potency of neutralisation of SARS-CoV-2. We demonstrate herein that exemplary antibodies neutralise SARS-CoV-2, particularly in vitro in pseudovirus assays and/or in live virus assays. Neutralising antibodies described herein, i.e. antibodies that neutralise SARS-CoV-2, will generally be understood to inhibit or prevent SARS-CoV-2 entering cells expressing the ACE2 receptor, e.g. lung epithelial cells. Antibodies might neutralise SARS-CoV-2 e.g. by competing with ACE2 for binding to SARS-CoV-2.

[0022] We further demonstrate herein that exemplary antibodies neutralise SARS-CoV-2 and specifically bind to the receptor binding domain (RBD) of the S1 subunit of SARS-CoV-2. Such antibodies may or may not compete with ACE2 for binding to SARS-CoV-2 and thus may or may not directly inhibit binding of SARS-CoV-2 to its receptor ACE2.

[0023] We further demonstrate herein that exemplary antibodies preferentially bind to the trimer form of the SARS-CoV-2 spike protein over the isolated RBD domain, S1 subunit and S2 subunit of the SARS-CoV-2 spike protein. Such antibodies generally do not compete with ACE2 for binding to SARS-CoV-2.

[0024] We further demonstrate herein that exemplary antibodies neutralise SARS-CoV-2 and specifically bind to the S2 subunit of SARS-CoV-2. Such antibodies generally do not compete with ACE2 for binding to SARS-CoV-2.

[0025] We further demonstrate herein that exemplary antibodies neutralise SARS-CoV-2 and specifically bind to the N-terminal domain (NTD) of the S1 subunit of the SARS-CoV-2 spike protein. Such antibodies generally do not compete with ACE2 for binding to SARS-CoV-2.

[0026] We further demonstrate herein that exemplary antibodies have high affinity (such as a KD of 10-9 M or lower or even a KD of 5×10⁻¹⁰ M, 1×10⁻¹⁰ M (0.1 nM) or lower) for SARS-CoV-2, particularly when measured using a surface plasmon resonance (SPR) assay (e.g. a Biacore SPR assay).

[0027] We demonstrate herein that exemplary antibodies neutralise SARS-CoV-2 with high potency (such as with an IC50 of lnM or lower, an IC50 of 100 pM or lower, an IC50 of 50 pM or lower, an IC50 of 10 pM or lower, or even an IC50 of 5 pM or lower) particularly in vitro in pseudovirus assays.

[0028] An aim of the present invention is to reduce the incidence of severe and critical disease and death through the administration of such monoclonal antibodies.

[0029] Administration of monoclonal antibodies of the invention may be used either as a prophylactic or as a therapeutic. Monoclonal antibodies of the invention may also be used in diagnosis.

### Group A—Competing RBD Binders:

[0030] In a first aspect, the present invention provides an antibody that specifically binds to the receptor binding domain (RBD) of the SARS-CoV-2 spike protein, wherein the antibody competes for binding to the SARS-CoV2 spike protein with the human ACE2 receptor.

[0031] In one embodiment, the antibody binds the isolated RBD of the SARS-CoV-2 spike protein with a KD of 10⁻⁹ M or lower (e.g. as measured by surface plasmon resonance (SPR)).

[0032] In one embodiment, the antibody neutralises SARS-CoV-2 with an IC50 of 50 pM or lower (e.g. as measured in a pseudovirus neutralisation assay).

[0033] In one embodiment, the antibody binds the isolated RBD of the SARS-CoV-2 spike protein with a KD of 10-9 M or lower (e.g. as measured by surface plasmon resonance (SPR)) and the antibody neutralises SARS-CoV2 with an IC50 of 50 pM or lower (e.g. as measured in a pseudovirus neutralisation assay).

[0034] In one embodiment, the antibody comprises a variable heavy (VH) domain sequence comprising complementarity determining regions (CDRs) HCDR1, HCDR2 and HCDR3, and a variable light (VL) domain sequence comprising complementarity determining regions LCDR1, LCDR2 and LCDR3, wherein the HCDR3 is the HCDR3 of antibody IMPI-029, IMPI-056, IMPI-005, IMPI-012, IMPI-052, IMPI-002, IMPI-041, IMPI-036, IMPI-055, IMPI-054, IMPI-042, IMPI-021, IMPI-004, IMPI-047, IMPI-017, IMPI-059, IMPI-0060, IMPI-006, IMPI-037, or IMPI-028.

[0035] In one embodiment, the antibody comprises a variable heavy (VH) domain sequence comprising complementarity determining regions (CDRs) HCDR1, HCDR2 and HCDR3, and a variable light (VL) domain sequence comprising complementarity determining regions LCDR1, LCDR2 and LCDR3, wherein HCDR3 is the HCDR3 of antibody IMPI-029, IMPI-056, IMPI-005, IMPI-012, IMPI-052, IMPI-002, IMPI-041, IMPI-036, IMPI-055, IMPI-054, IMPI-042, IMPI-021, IMPI-004, IMPI-047, IMPI-017, IMPI-059, or IMPI-028.

[0036] In one embodiment, the antibody binds the isolated RBD of the SARS-CoV-2 spike protein with a KD of 10-9 M or lower (e.g. as measured by surface plasmon resonance (SPR)) and HCDR3 is the HCDR3 of antibody IMPI-004, IMPI-006, IMPI-029, IMPI-056, IMPI-055, or IMPI-059 or an antibody in the same cluster as one of these antibodies.

[0037] In one embodiment, the antibody binds the isolated RBD of the SARS-CoV-2 spike protein with a KD of 10-9 M or lower (e.g. as measured by surface plasmon resonance (SPR)) and HCDR3 is the HCDR3 of antibody IMPI-004, IMPI-006, IMPI-029, IMPI-056, IMPI-055, or IMPI-059.

[0038] In one embodiment, the antibody binds the isolated RBD of the SARS-CoV-2 spike protein with a KD of 10-9 M or lower (e.g. as measured by surface plasmon resonance (SPR)) and HCDR3 is the HCDR3 of antibody IMPI-004, IMPI-029, IMPI-056, IMPI-055, or IMPI-059 or an antibody in the same cluster as one of these antibodies.

[0039] In one embodiment, the antibody binds the isolated RBD of the SARS-CoV-2 spike protein with a KD of 10-9 M or lower (e.g. as measured by surface plasmon resonance (SPR)) and HCDR3 is the HCDR3 of antibody IMPI-004, IMPI-029, IMPI-056, IMPI-055, or IMPI-059.

[0040] In one embodiment, the antibody neutralises SARS-CoV-2 with an IC50 of 50 pM or lower (e.g. as measured in a pseudovirus neutralisation assay) and HCDR3 is the HCDR3 of antibody IMPI-004, IMPI-029, IMPI-055, or IMPI-059, or IMPI-017 or an antibody in the same cluster as one of these antibodies.

[0041] In one embodiment, the antibody neutralises SARS-CoV-2 with an IC50 of 50 pM or lower (e.g. as measured in a pseudovirus neutralisation assay) and HCDR3 is the HCDR3 of antibody IMPI-004, IMPI-029, IMPI-055, or IMPI-059, or IMPI-017.

[0042] In one embodiment, the antibody binds the isolated RBD of the SARS-CoV-2 spike protein with a KD of 10-9 M or lower (e.g. as measured by surface plasmon resonance (SPR)) and the antibody neutralises SARS-CoV-2 with an IC50 of 50 pM or lower (e.g. as measured in a pseudovirus neutralisation assay) and HCDR3 is the HCDR3 of antibody IMPI-004, IMPI-029, IMPI-055, or IMPI-059 or an antibody in the same cluster as one of these antibodies.

[0043] In one embodiment, the antibody binds the isolated RBD of the SARS-CoV-2 spike protein with a KD of 10-9 M or lower (e.g. as measured by surface plasmon resonance (SPR)) and the antibody neutralises SARS-CoV-2 with an IC50 of 50 pM or lower (e.g. as measured in a pseudovirus neutralisation assay) and HCDR3 is the HCDR3 of antibody IMPI-004, IMPI-029, or IMPI-055.

[0044] In one embodiment, HCDR3 is the HCDR3 of antibody IMPI-029.

[0045] In one embodiment, HCDR3 is the HCDR3 of antibody IMPI-056.

[0046] In one embodiment, HCDR3 is the HCDR3 of antibody IMPI-005.

[0047] In one embodiment, HCDR3 is the HCDR3 of antibody IMPI-012.

[0048] In one embodiment, HCDR3 is the HCDR3 of antibody IMPI-052.

[0049] In one embodiment, HCDR3 is the HCDR3 of antibody IMPI-002.

[0050] In one embodiment, HCDR3 is the HCDR3 of antibody IMPI-041.

[0051] In one embodiment, HCDR3 is the HCDR3 of antibody IMPI-036.

[0052] In one embodiment, HCDR3 is the HCDR3 of antibody IMPI-055.

[0053] In one embodiment, HCDR3 is the HCDR3 of antibody IMPI-054.

[0054] In one embodiment, HCDR3 is the HCDR3 of antibody IMPI-042.

[0055] In one embodiment, HCDR3 is the HCDR3 of antibody IMPI-021.

[0056] In one embodiment, HCDR3 is the HCDR3 of antibody IMPI-004.

[0057] In one embodiment, HCDR3 is the HCDR3 of antibody IMPI-047.

[0058] In one embodiment, HCDR3 is the HCDR3 of antibody IMPI-017.

[0059] In one embodiment, HCDR3 is the HCDR3 of antibody IMPI-059.

[0060] In one embodiment, HCDR3 is the HCDR3 of antibody IMPI-060.

[0061] In one embodiment, HCDR3 is the HCDR3 of antibody IMPI-006.

[0062] In one embodiment, HCDR3 is the HCDR3 of antibody IMPI-037.

[0063] In one embodiment, HCDR3 is the HCDR3 of antibody IMPI-028.

[0064] In one embodiment, the present invention provides an anti-SARS-CoV-2 antibody,

wherein the antibody comprises a variable heavy (VH) domain sequence comprising complementarity determining regions (CDRs) HCDR1, HCDR2, and HCDR3, and a variable light (VL) domain sequence comprising complementarity determining regions LCDR1, LCDR2 and LCDR3,
wherein the CDRs are those of antibody IMPI-029, IMPI-056, IMPI-005, IMPI-012, IMPI-052, IMPI-002, IMPI-041, IMPI-036, IMPI-055, IMPI-054, IMPI-042, IMPI-021, IMPI-004, IMPI-047, IMPI-017, IMPI-059, IMPI-060, IMPI-006, IMPI-037, or IMPI-028.

[0065] In one embodiment, the present invention provides an anti-SARS-CoV-2 antibody,

wherein the antibody comprises a variable heavy (VH) domain sequence comprising complementarity determining regions (CDRs) HCDR1, HCDR2, and HCDR3, and a variable light (VL) domain sequence comprising complementarity determining regions LCDR1, LCDR2 and LCDR3,
wherein the CDRs are those of antibody IMPI-029, IMPI-056, IMPI-005, IMPI-012, IMPI-052, IMPI-002, IMPI-041, IMPI-036, IMPI-055, IMPI-054, IMPI-042, IMPI-021, IMPI-004, IMPI-047, IMPI-017, IMPI-059, or IMPI-028.

[0066] In one embodiment, the present invention provides an anti-SARS-CoV-2 antibody which competes for binding to the SARS-CoV-2 spike protein with the human ACE2 receptor,

wherein the antibody comprises a variable heavy (VH) domain sequence comprising complementarity determining regions (CDRs) HCDR1, HCDR2, and HCDR3, and a variable light (VL) domain sequence comprising complementarity determining regions LCDR1, LCDR2 and LCDR3,
wherein the CDRs are those of antibody IMPI-029, IMPI-056, IMPI-005, IMPI-012, IMPI-052, IMPI-002, IMPI-041, IMPI-036, IMPI-055, IMPI-054, IMPI-042, IMPI-021, IMPI-004, IMPI-047, IMPI-017, IMPI-059, IMPI-060, IMPI-006, IMPI-037, or IMPI-028.

[0067] In one embodiment, the present invention provides an anti-SARS-CoV-2 antibody which competes for binding to the SARS-CoV-2 spike protein with the human ACE2 receptor,

wherein the antibody comprises a variable heavy (VH) domain sequence comprising complementarity determining regions (CDRs) HCDR1, HCDR2, and HCDR3, and a variable light (VL) domain sequence comprising complementarity determining regions LCDR1, LCDR2 and LCDR3,
wherein the CDRs are those of antibody IMPI-029, IMPI-056, IMPI-005, IMPI-012, IMPI-052, IMPI-002, IMPI-041, IMPI-036, IMPI-055, IMPI-054, IMPI-042, IMPI-021, IMPI-004, IMPI-047, IMPI-017, IMPI-059, or IMPI-028.

[0068] In one embodiment of the first aspect, the CDRs are those of antibody IMPI-029, IMPI-056, IMPI-005, IMPI-012, IMPI-052, IMPI-002, IMPI-041, IMPI-036, IMPI-055, IMPI-054, IMPI-042, IMPI-021, IMPI-004, IMPI-047, IMPI-017, IMPI-059, IMPI-060, IMPI-006, IMPI-037, or IMPI-028.

[0069] In one embodiment of the first aspect, the CDRs are those of antibody IMPI-029, IMPI-056, IMPI-005, IMPI-012, IMPI-052, IMPI-002, IMPI-041, IMPI-036, IMPI-055, IMPI-054, IMPI-042, IMPI-021, IMPI-004, IMPI-047, IMPI-017, IMPI-059, or IMPI-028.

[0070] In one embodiment, the antibody binds the isolated RBD of the SARS-CoV-2 spike protein with a KD of 10-9 M or lower (e.g. as measured by surface plasmon resonance (SPR)) and the CDRs are those of antibody IMPI-004, IMPI-029, IMPI-056, IMPI-055, IMPI-006, or IMPI-059 or an antibody in the same cluster as one of these antibodies.

[0071] In one embodiment, the antibody binds the isolated RBD of the SARS-CoV-2 spike protein with a KD of 10-9 M or lower (e.g. as measured by surface plasmon resonance (SPR)) and the CDRs are those of antibody IMPI-004, IMPI-029, IMPI-056, IMPI-055, IMPI-006, or IMPI-059.

[0072] In one embodiment, the antibody binds the isolated RBD of the SARS-CoV-2 spike protein with a KD of 10-9 M or lower (e.g. as measured by surface plasmon resonance (SPR)) and the CDRs are those of antibody IMPI-004, IMPI-029, IMPI-056, IMPI-055, or IMPI-059 or an antibody in the same cluster as one of these antibodies.

[0073] In one embodiment, the antibody binds the isolated RBD of the SARS-CoV-2 spike protein with a KD of 10-9 M or lower (e.g. as measured by surface plasmon resonance (SPR)) and the CDRs are those of antibody IMPI-004, IMPI-029, IMPI-056, IMPI-055, or IMPI-059.

[0074] In one embodiment, the antibody neutralises SARS-CoV-2 with an IC50 of 50 pM or lower (e.g. as measured in a pseudovirus neutralisation assay) and the CDRs are those of antibody IMPI-004, IMPI-029, IMPI-055, or IMPI-059, or IMPI-017 or an antibody in the same cluster as one of these antibodies.

[0075] In one embodiment, the antibody neutralises SARS-CoV-2 with an IC50 of 50 pM or lower (e.g. as measured in a pseudovirus neutralisation assay) and the CDRs are those of antibody IMPI-004, IMPI-029, IMPI-055, or IMPI-059, or IMPI-017.

[0076] In one embodiment, the antibody binds the isolated RBD of the SARS-CoV-2 spike protein with a KD of 10-9 M or lower (e.g. as measured by surface plasmon resonance (SPR)) and the antibody neutralises SARS-CoV-2 with an IC50 of 50 pM or lower (e.g. as measured in a pseudovirus neutralisation assay) and the CDRs are those of antibody IMPI-004, IMPI-029, IMPI-055, or IMPI-059 or an antibody in the same cluster as one of these antibodies.

[0077] In one embodiment, the antibody binds the isolated RBD of the SARS-CoV-2 spike protein with a KD of 10-9 M or lower (e.g. as measured by surface plasmon resonance (SPR)) and the antibody neutralises SARS-CoV-2 with an IC50 of 50 pM or lower (e.g. as measured in a pseudovirus neutralisation assay) and the CDRs are those of antibody IMPI-004, IMPI-029, IMPI-055, or IMPI-059.

[0078] In one embodiment, the antibody has the CDRs of antibody IMPI-029.

[0079] In one embodiment, the antibody has the CDRs of antibody IMPI-056.

[0080] In one embodiment, the antibody has the CDRs of antibody IMPI-005.

[0081] In one embodiment, the antibody has the CDRs of antibody IMPI-012.

[0082] In one embodiment, the antibody has the CDRs of antibody IMPI-052.

[0083] In one embodiment, the antibody has the CDRs of antibody IMPI-002.

[0084] In one embodiment, the antibody has the CDRs of antibody IMPI-041.

[0085] In one embodiment, the antibody has the CDRs of antibody IMPI-036.

[0086] In one embodiment, the antibody has the CDRs of antibody IMPI-055.

[0087] In one embodiment, the antibody has the CDRs of antibody IMPI-054.

[0088] In one embodiment, the antibody has the CDRs of antibody IMPI-042.

[0089] In one embodiment, the antibody has the CDRs of antibody IMPI-021.

[0090] In one embodiment, the antibody has the CDRs of antibody IMPI-004.

[0091] In one embodiment, the antibody has the CDRs of antibody IMPI-047.

[0092] In one embodiment, the antibody has the CDRs of antibody IMPI-017.

[0093] In one embodiment, the antibody has the CDRs of antibody IMPI-059.

[0094] In one embodiment, the antibody has the CDRs of antibody IMPI-060.

[0095] In one embodiment, the antibody has the CDRs of antibody IMPI-006.

[0096] In one embodiment, the antibody has the CDRs of antibody IMPI-037.

[0097] In one embodiment, the antibody has the CDRs of antibody IMPI-028.

[0098] In one embodiment, the antibody comprises a variable heavy (VH) domain sequence and a variable light (VL) domain sequence and wherein the variable heavy (VH) domain and variable light (VL) domain sequences respectively comprise the variable heavy (VH) domain and variable light (VL) domain sequences of antibody IMPI-029, IMPI-056, IMPI-005, IMPI-012, IMPI-052, IMPI-002, IMPI-041, IMPI-036, IMPI-055, IMPI-054, IMPI-042, IMPI-021, IMPI-004, IMPI-047, IMPI-017, IMPI-059, IMPI-060, IMPI-006, IMPI-037, or IMPI-028, optionally with 1, 2, 3, 4 or 5 amino acid alterations outside the complementarity determining regions (CDRs) in the variable heavy (VH) domain sequence and optionally with 1, 2, 3, 4 or 5 amino acid alterations outside the complementarity determining regions (CDRs) in the variable light (VL) domain sequence.

[0099] In one embodiment, the antibody comprises a variable heavy (VH) domain sequence and a variable light (VL) domain sequence and wherein the variable heavy (VH) domain and variable light (VL) domain sequences respectively comprise the variable heavy (VH) domain and variable light (VL) domain sequences of antibody IMPI-029, IMPI-056, IMPI-005, IMPI-012, IMPI-052, IMPI-002, IMPI-041, IMPI-036, IMPI-055, IMPI-054, IMPI-042, IMPI-021, IMPI-004, IMPI-047, IMPI-017, IMPI-059, or IMPI-028, optionally with 1, 2, 3, 4 or 5 amino acid alterations outside the complementarity determining regions (CDRs) in the variable heavy (VH) domain sequence and optionally with 1, 2, 3, 4 or 5 amino acid alterations outside the complementarity determining regions (CDRs) in the variable light (VL) domain sequence.

[0100] In one embodiment, the antibody binds the isolated RBD of the SARS-CoV-2 spike protein with a KD of 10-9 M or lower (e.g. as measured by surface plasmon resonance (SPR)) and the variable heavy (VH) domain and variable light (VL) domain sequences respectively comprise the variable heavy (VH) domain and variable light (VL) domain sequences of antibody IMPI-004, IMPI-029, IMPI-056, IMPI-055, IMPI-006 or IMPI-059 or an antibody in the same cluster as one of these antibodies, optionally with 1, 2, 3, 4 or 5 amino acid alterations outside the complementarity determining regions (CDRs) in the variable heavy (VH) domain sequence and optionally with 1, 2, 3, 4 or 5 amino acid alterations outside the complementarity determining regions (CDRs) in the variable light (VL) domain sequence.

[0101] In one embodiment, the antibody binds the isolated RBD of the SARS-CoV-2 spike protein with a KD of 10-9 M or lower (e.g. as measured by surface plasmon resonance (SPR)) and the variable heavy (VH) domain and variable light (VL) domain sequences respectively comprise the variable heavy (VH) domain and variable light (VL) domain sequences of antibody IMPI-004, IMPI-029, IMPI-056, IMPI-055, IMPI-006 or IMPI-059, optionally with 1, 2, 3, 4 or 5 amino acid alterations outside the complementarity determining regions (CDRs) in the variable heavy (VH) domain sequence and optionally with 1, 2, 3, 4 or 5 amino acid alterations outside the complementarity determining regions (CDRs) in the variable light (VL) domain sequence.

[0102] In one embodiment, the antibody binds the isolated RBD of the SARS-CoV-2 spike protein with a KD of 10-9 M or lower (e.g. as measured by surface plasmon resonance (SPR)) and the variable heavy (VH) domain and variable light (VL) domain sequences respectively comprise the variable heavy (VH) domain and variable light (VL) domain sequences of antibody IMPI-004, IMPI-029, IMPI-056, IMPI-055, or IMPI-059 or an antibody in the same cluster as one of these antibodies, optionally with 1, 2, 3, 4 or 5 amino acid alterations outside the complementarity determining regions (CDRs) in the variable heavy (VH) domain sequence and optionally with 1, 2, 3, 4 or 5 amino acid alterations outside the complementarity determining regions (CDRs) in the variable light (VL) domain sequence.

[0103] In one embodiment, the antibody binds the isolated RBD of the SARS-CoV-2 spike protein with a KD of 10-9 M or lower (e.g. as measured by surface plasmon resonance (SPR)) and the variable heavy (VH) domain and variable light (VL) domain sequences respectively comprise the variable heavy (VH) domain and variable light (VL) domain sequences of antibody IMPI-004, IMPI-029, IMPI-056, IMPI-055, or IMPI-059, optionally with 1, 2, 3, 4 or 5 amino acid alterations outside the complementarity determining regions (CDRs) in the variable heavy (VH) domain sequence and optionally with 1, 2, 3, 4 or 5 amino acid alterations outside the complementarity determining regions (CDRs) in the variable light (VL) domain sequence.

[0104] In one embodiment, the antibody neutralises SARS-CoV-2 with an IC50 of 50 pM or lower (e.g. as measured in a pseudovirus neutralisation assay) and the variable heavy (VH) domain and variable light (VL) domain sequences respectively comprise the variable heavy (VH) domain and variable light (VL) domain sequences of antibody IMPI-004, IMPI-029, IMPI-055, or IMPI-059, or IMPI-017 or an antibody in the same cluster as one of these antibodies, optionally with 1, 2, 3, 4 or 5 amino acid alterations outside the complementarity determining regions (CDRs) in the variable heavy (VH) domain sequence and optionally with 1, 2, 3, 4 or 5 amino acid alterations outside the complementarity determining regions (CDRs) in the variable light (VL) domain sequence.

[0105] In one embodiment, the antibody neutralises SARS-CoV-2 with an IC50 of 50 pM or lower (e.g. as measured in a pseudovirus neutralisation assay) and the variable heavy (VH) domain and variable light (VL) domain sequences respectively comprise the variable heavy (VH) domain and variable light (VL) domain sequences of antibody IMPI-004, IMPI-029, IMPI-055, or IMPI-059, or IMPI-017, optionally with 1, 2, 3, 4 or 5 amino acid alterations outside the complementarity determining regions (CDRs) in the variable heavy (VH) domain sequence and optionally with 1, 2, 3, 4 or 5 amino acid alterations outside the complementarity determining regions (CDRs) in the variable light (VL) domain sequence.

[0106] In one embodiment, the antibody binds the isolated RBD of the SARS-CoV-2 spike protein with a KD of 10-9 M or lower (e.g. as measured by surface plasmon resonance (SPR)) and the antibody neutralises SARS-CoV2 with an IC50 of 50 pM or lower (e.g. as measured in a pseudovirus neutralisation assay) and the variable heavy (VH) domain and variable light (VL) domain sequences respectively comprise the variable heavy (VH) domain and variable light (VL) domain sequences of antibody IMPI-004, IMPI-029, IMPI-055, or IMPI-059 or an antibody in the same cluster as one of these antibodies, optionally with 1, 2, 3, 4 or 5 amino acid alterations outside the complementarity determining regions (CDRs) in the variable heavy (VH) domain sequence and optionally with 1, 2, 3, 4 or 5 amino acid alterations outside the complementarity determining regions (CDRs) in the variable light (VL) domain sequence.

[0107] In one embodiment, the antibody binds the isolated RBD of the SARS-CoV-2 spike protein with a KD of 10-9 M or lower (e.g. as measured by surface plasmon resonance (SPR)) and the antibody neutralises SARS-CoV2 with an IC50 of 50 pM or lower (e.g. as measured in a pseudovirus neutralisation assay) and the variable heavy (VH) domain and variable light (VL) domain sequences respectively comprise the variable heavy (VH) domain and variable light (VL) domain sequences of antibody IMPI-004, IMPI-029, IMPI-055, or IMPI-059, optionally with 1, 2, 3, 4 or 5 amino acid alterations outside the complementarity determining regions (CDRs) in the variable heavy (VH) domain sequence and optionally with 1, 2, 3, 4 or 5 amino acid alterations outside the complementarity determining regions (CDRs) in the variable light (VL) domain sequence.

[0108] In one embodiment, the antibody comprises a variable heavy (VH) domain sequence of antibody IMPI-029, optionally with 1, 2, 3, 4 or 5 amino acid alterations outside the complementarity determining regions (CDRs), and a variable light (VL) domain sequence of antibody IMPI-029, optionally with 1, 2, 3, 4 or 5 amino acid alterations outside the complementarity determining regions (CDRs).

[0109] In one embodiment, the antibody comprises a variable heavy (VH) domain sequence of antibody IMPI-056, optionally with 1, 2, 3, 4 or 5 amino acid alterations outside the complementarity determining regions (CDRs), and a variable light (VL) domain sequence of antibody IMPI-056, optionally with 1, 2, 3, 4 or 5 amino acid alterations outside the complementarity determining regions (CDRs).

[0110] In one embodiment, the antibody comprises a variable heavy (VH) domain sequence of antibody IMPI-005, optionally with 1, 2, 3, 4 or 5 amino acid alterations outside the complementarity determining regions (CDRs), and a variable light (VL) domain sequence of antibody IMPI-005, optionally with 1, 2, 3, 4 or 5 amino acid alterations outside the complementarity determining regions (CDRs).

[0111] In one embodiment, the antibody comprises a variable heavy (VH) domain sequence of antibody IMPI-012, optionally with 1, 2, 3, 4 or 5 amino acid alterations outside the complementarity determining regions (CDRs), and a variable light (VL) domain sequence of antibody IMPI-012, optionally with 1, 2, 3, 4 or 5 amino acid alterations outside the complementarity determining regions (CDRs).

[0112] In one embodiment, the antibody comprises a variable heavy (VH) domain sequence of antibody IMPI-052, optionally with 1, 2, 3, 4 or 5 amino acid alterations outside the complementarity determining regions (CDRs), and a variable light (VL) domain sequence of antibody IMPI-052, optionally with 1, 2, 3, 4 or 5 amino acid alterations outside the complementarity determining regions (CDRs).

[0113] In one embodiment, the antibody comprises a variable heavy (VH) domain sequence of antibody IMPI-002, optionally with 1, 2, 3, 4 or 5 amino acid alterations outside the complementarity determining regions (CDRs), and a variable light (VL) domain sequence of antibody IMPI-002, optionally with 1, 2, 3, 4 or 5 amino acid alterations outside the complementarity determining regions (CDRs).

[0114] In one embodiment, the antibody comprises a variable heavy (VH) domain sequence of antibody IMPI-041, optionally with 1, 2, 3, 4 or 5 amino acid alterations outside the complementarity determining regions (CDRs), and a variable light (VL) domain sequence of antibody IMPI-041, optionally with 1, 2, 3, 4 or 5 amino acid alterations outside the complementarity determining regions (CDRs).

[0115] In one embodiment, the antibody comprises a variable heavy (VH) domain sequence of antibody IMPI-036, optionally with 1, 2, 3, 4 or 5 amino acid alterations outside the complementarity determining regions (CDRs), and a variable light (VL) domain sequence of antibody IMPI-036, optionally with 1, 2, 3, 4 or 5 amino acid alterations outside the complementarity determining regions (CDRs).

[0116] In one embodiment, the antibody comprises a variable heavy (VH) domain sequence of antibody IMPI-055, optionally with 1, 2, 3, 4 or 5 amino acid alterations outside the complementarity determining regions (CDRs), and a variable light (VL) domain sequence of antibody IMPI-055, optionally with 1, 2, 3, 4 or 5 amino acid alterations outside the complementarity determining regions (CDRs).

[0117] In one embodiment, the antibody comprises a variable heavy (VH) domain sequence of antibody IMPI-054, optionally with 1, 2, 3, 4 or 5 amino acid alterations outside the complementarity determining regions (CDRs), and a variable light (VL) domain sequence of antibody IMPI-054, optionally with 1, 2, 3, 4 or 5 amino acid alterations outside the complementarity determining regions (CDRs).

[0118] In one embodiment, the antibody comprises a variable heavy (VH) domain sequence of antibody IMPI-042, optionally with 1, 2, 3, 4 or 5 amino acid alterations outside the complementarity determining regions (CDRs), and a variable light (VL) domain sequence of antibody IMPI-042, optionally with 1, 2, 3, 4 or 5 amino acid alterations outside the complementarity determining regions (CDRs).

[0119] In one embodiment, the antibody comprises a variable heavy (VH) domain sequence of antibody IMPI-021, optionally with 1, 2, 3, 4 or 5 amino acid alterations outside the complementarity determining regions (CDRs), and a variable light (VL) domain sequence of antibody IMPI-021, optionally with 1, 2, 3, 4 or 5 amino acid alterations outside the complementarity determining regions (CDRs).

[0120] In one embodiment, the antibody comprises a variable heavy (VH) domain sequence of antibody IMPI-004, optionally with 1, 2, 3, 4 or 5 amino acid alterations outside the complementarity determining regions (CDRs), and a variable light (VL) domain sequence of antibody IMPI-004, optionally with 1, 2, 3, 4 or 5 amino acid alterations outside the complementarity determining regions (CDRs).

[0121] In one embodiment, the antibody comprises a variable heavy (VH) domain sequence of antibody IMPI-047, optionally with 1, 2, 3, 4 or 5 amino acid alterations outside the complementarity determining regions (CDRs), and a variable light (VL) domain sequence of antibody IMPI-047, optionally with 1, 2, 3, 4 or 5 amino acid alterations outside the complementarity determining regions (CDRs).

[0122] In one embodiment, the antibody comprises a variable heavy (VH) domain sequence of antibody IMPI-017, optionally with 1, 2, 3, 4 or 5 amino acid alterations outside the complementarity determining regions (CDRs), and a variable light (VL) domain sequence of antibody IMPI-017, optionally with 1, 2, 3, 4 or 5 amino acid alterations outside the complementarity determining regions (CDRs).

[0123] In one embodiment, the antibody comprises a variable heavy (VH) domain sequence of antibody IMPI-059, optionally with 1, 2, 3, 4 or 5 amino acid alterations outside the complementarity determining regions (CDRs), and a variable light (VL) domain sequence of antibody IMPI-059, optionally with 1, 2, 3, 4 or 5 amino acid alterations outside the complementarity determining regions (CDRs).

[0124] In one embodiment, the antibody comprises a variable heavy (VH) domain sequence of antibody IMPI-060, optionally with 1, 2, 3, 4 or 5 amino acid alterations outside the complementarity determining regions (CDRs), and a variable light (VL) domain sequence of antibody IMPI-060, optionally with 1, 2, 3, 4 or 5 amino acid alterations outside the complementarity determining regions (CDRs).

[0125] In one embodiment, the antibody comprises a variable heavy (VH) domain sequence of antibody IMPI-006, optionally with 1, 2, 3, 4 or 5 amino acid alterations outside the complementarity determining regions (CDRs), and a variable light (VL) domain sequence of antibody IMPI-006, optionally with 1, 2, 3, 4 or 5 amino acid alterations outside the complementarity determining regions (CDRs).

[0126] In one embodiment, the antibody comprises a variable heavy (VH) domain sequence of antibody IMPI-037, optionally with 1, 2, 3, 4 or 5 amino acid alterations outside the complementarity determining regions (CDRs), and a variable light (VL) domain sequence of antibody IMPI-037, optionally with 1, 2, 3, 4 or 5 amino acid alterations outside the complementarity determining regions (CDRs).

[0127] In one embodiment, the antibody comprises a variable heavy (VH) domain sequence of antibody IMPI-028, optionally with 1, 2, 3, 4 or 5 amino acid alterations outside the complementarity determining regions (CDRs), and a variable light (VL) domain sequence of antibody IMPI-028, optionally with 1, 2, 3, 4 or 5 amino acid alterations outside the complementarity determining regions (CDRs).

[0128] In one embodiment, the antibody comprises a variable heavy (VH) domain sequence and a variable light (VL) domain sequence and wherein the variable heavy (VH) domain and variable light (VL) domain sequences respectively comprise a sequence having at least 90% identity to the variable heavy (VH) and variable light (VL) domain sequences of antibody IMPI-029, IMPI-056, IMPI-005, IMPI-012, IMPI-052, IMPI-002, IMPI-041, IMPI-036, IMPI-055, IMPI-054, IMPI-042, IMPI-021, IMPI-060, IMPI-006, IMPI-004, IMPI-047, IMPI-037, IMPI-017, IMPI-059, or IMPI-028, provided that the antibody has the CDRs of antibody IMPI-029, IMPI-056, IMPI-005, IMPI-012, IMPI-052, IMPI-002, IMPI-041, IMPI-036, IMPI-055, IMPI-054, IMPI-042, IMPI-021, IMPI-060, IMPI-006, IMPI-004, IMPI-047, IMPI-037, IMPI-017, IMPI-059, or IMPI-028.

[0129] In one embodiment, the antibody comprises a variable heavy (VH) domain sequence and a variable light (VL) domain sequence and wherein the variable heavy (VH) domain and variable light (VL) domain sequences respectively comprise a sequence having at least 90% identity to the variable heavy (VH) and variable light (VL) domain sequences of antibody IMPI-029, IMPI-056, IMPI-005, IMPI-012, IMPI-052, IMPI-002, IMPI-041, IMPI-036, IMPI-055, IMPI-054, IMPI-042, IMPI-021, IMPI-004, IMPI-047, IMPI-017, IMPI-059, or IMPI-028, provided that the antibody has the CDRs of antibody IMPI-029, IMPI-056, IMPI-005, IMPI-012, IMPI-052, IMPI-002, IMPI-041, IMPI-036, IMPI-055, IMPI-054, IMPI-042, IMPI-021, IMPI-004, IMPI-047, IMPI-017, IMPI-059, or IMPI-028.

[0130] In one embodiment, the antibody binds the isolated RBD of the SARS-CoV-2 spike protein with a KD of 10-9 M or lower (e.g. as measured by surface plasmon resonance (SPR)) and the antibody comprises a variable heavy (VH) domain sequence and a variable light (VL) domain sequence and wherein the variable heavy (VH) domain and variable light (VL) domain sequences respectively comprise a sequence having at least 90% identity to the variable heavy (VH) and variable light (VL) domain sequences of antibody IMPI-004, IMPI-029, IMPI-056, IMPI-006, IMPI-055, or IMPI-059 or an antibody in the same cluster as one of these antibodies, provided that the antibody has the CDRs of antibody IMPI-004, IMPI-029, IMPI-056, IMPI-006, IMPI-055, or IMPI-059 or an antibody in the same cluster as one of these antibodies.

[0131] In one embodiment, the antibody binds the isolated RBD of the SARS-CoV-2 spike protein with a KD of 10-9 M or lower (e.g. as measured by surface plasmon resonance (SPR)) and the antibody comprises a variable heavy (VH) domain sequence and a variable light (VL) domain sequence and wherein the variable heavy (VH) domain and variable light (VL) domain sequences respectively comprise a sequence having at least 90% identity to the variable heavy (VH) and variable light (VL) domain sequences of antibody IMPI-004, IMPI-029, IMPI-056, IMPI-006, IMPI-055, or IMPI-059, provided that the antibody has the CDRs of antibody IMPI-004, IMPI-029, IMPI-056, IMPI-006, IMPI-055, or IMPI-059.

[0132] In one embodiment, the antibody binds the isolated RBD of the SARS-CoV-2 spike protein with a KD of 10-9 M or lower (e.g. as measured by surface plasmon resonance (SPR)) and the antibody comprises a variable heavy (VH) domain sequence and a variable light (VL) domain sequence and wherein the variable heavy (VH) domain and variable light (VL) domain sequences respectively comprise a sequence having at least 90% identity to the variable heavy (VH) and variable light (VL) domain sequences of antibody IMPI-004, IMPI-029, IMPI-056, IMPI-055, or IMPI-059 or an antibody in the same cluster as one of these antibodies, provided that the antibody has the CDRs of antibody IMPI-004, IMPI-029, IMPI-056, IMPI-055, or IMPI-059 or an antibody in the same cluster as one of these antibodies.

[0133] In one embodiment, the antibody binds the isolated RBD of the SARS-CoV-2 spike protein with a KD of 10-9 M or lower (e.g. as measured by surface plasmon resonance (SPR)) and the antibody comprises a variable heavy (VH) domain sequence and a variable light (VL) domain sequence and wherein the variable heavy (VH) domain and variable light (VL) domain sequences respectively comprise a sequence having at least 90% identity to the variable heavy (VH) and variable light (VL) domain sequences of antibody IMPI-004, IMPI-029, IMPI-056, IMPI-055, or IMPI-059, provided that the antibody has the CDRs of antibody IMPI-004, IMPI-029, IMPI-056, IMPI-055, or IMPI-059.

[0134] In one embodiment, the antibody neutralises SARS-CoV-2 with an IC50 of 50 pM or lower (e.g. as measured in a pseudovirus neutralisation assay) and the antibody comprises a variable heavy (VH) domain sequence and a variable light (VL) domain sequence and wherein the variable heavy (VH) domain and variable light (VL) domain sequences respectively comprise a sequence having at least 90% identity to the variable heavy (VH) and variable light (VL) domain sequences of antibody IMPI-004, IMPI-029, IMPI-055, or IMPI-059, or IMPI-017 or an antibody in the same cluster as one of these antibodies, provided that the antibody has the CDRs of antibody IMPI-004, IMPI-029, IMPI-055, or IMPI-059, or IMPI-017 or an antibody in the same cluster as one of these antibodies.

[0135] In one embodiment, the antibody neutralises SARS-CoV-2 with an IC50 of 50 pM or lower (e.g. as measured in a pseudovirus neutralisation assay) and the antibody comprises a variable heavy (VH) domain sequence and a variable light (VL) domain sequence and wherein the variable heavy (VH) domain and variable light (VL) domain sequences respectively comprise a sequence having at least 90% identity to the variable heavy (VH) and variable light (VL) domain sequences of antibody IMPI-004, IMPI-029, IMPI-055, or IMPI-059, or IMPI-017, provided that the antibody has the CDRs of antibody IMPI-004, IMPI-029, IMPI-055, or IMPI-059, or IMPI-017.

[0136] In one embodiment, the antibody binds the isolated RBD of the SARS-CoV-2 spike protein with a KD of 10-9 M or lower (e.g. as measured by surface plasmon resonance (SPR)) and the antibody neutralises SARS-CoV2 with an IC50 of 50 pM or lower (e.g. as measured in a pseudovirus neutralisation assay) and the antibody comprises a variable heavy (VH) domain sequence and a variable light (VL) domain sequence and wherein the variable heavy (VH) domain and variable light (VL) domain sequences respectively comprise a sequence having at least 90% identity to the variable heavy (VH) and variable light (VL) domain sequences of antibody IMPI-004, IMPI-029, IMPI-055, or IMPI-059 or an antibody in the same cluster as one of these antibodies, provided that the antibody has the CDRs of antibody IMPI-004, IMPI-029, IMPI-055, or IMPI-059 or an antibody in the same cluster as one of these antibodies.

[0137] In one embodiment, the antibody binds the isolated RBD of the SARS-CoV-2 spike protein with a KD of 10-9 M or lower (e.g. as measured by surface plasmon resonance (SPR)) and the antibody neutralises SARS-CoV2 with an IC50 of 50 pM or lower (e.g. as measured in a pseudovirus neutralisation assay) and the antibody comprises a variable heavy (VH) domain sequence and a variable light (VL) domain sequence and wherein the variable heavy (VH) domain and variable light (VL) domain sequences respectively comprise a sequence having at least 90% identity to the variable heavy (VH) and variable light (VL) domain sequences of antibody IMPI-004, IMPI-029, IMPI-055, or IMPI-059, provided that the antibody has the CDRs of antibody IMPI-004, IMPI-029, IMPI-055, or IMPI-059.

[0138] In one embodiment, the variable heavy (VH) domain sequence comprises a sequence having at least 90% identity to the VH domain sequence of antibody IMPI-029 and the variable light (VL) domain sequence comprises a sequence having at least 90% identity to the VL domain sequence of antibody IMPI-029, provided that the antibody has the CDRs of antibody IMPI-029.

[0139] In one embodiment, the variable heavy (VH) domain sequence comprises a sequence having at least 90% identity to the VH domain sequence of antibody IMPI-056 and the variable light (VL) domain sequence comprises a sequence having at least 90% identity to the VL domain sequence of antibody IMPI-056, provided that the antibody has the CDRs of antibody IMPI-056.

[0140] In one embodiment, the variable heavy (VH) domain sequence comprises a sequence having at least 90% identity to the VH domain sequence of antibody IMPI-005 and the variable light (VL) domain sequence comprises a sequence having at least 90% identity to the VL domain sequence of antibody IMPI-005, provided that the antibody has the CDRs of antibody IMPI-005.

[0141] In one embodiment, the variable heavy (VH) domain sequence comprises a sequence having at least 90% identity to the VH domain sequence of antibody IMPI-012 and the variable light (VL) domain sequence comprises a sequence having at least 90% identity to the VL domain sequence of antibody IMPI-012, provided that the antibody has the CDRs of antibody IMPI-012.

[0142] In one embodiment, the variable heavy (VH) domain sequence comprises a sequence having at least 90% identity to the VH domain sequence of antibody IMPI-052 and the variable light (VL) domain sequence comprises a sequence having at least 90% identity to the VL domain sequence of antibody IMPI-052, provided that the antibody has the CDRs of antibody IMPI-052.

[0143] In one embodiment, the variable heavy (VH) domain sequence comprises a sequence having at least 90% identity to the VH domain sequence of antibody IMPI-002 and the variable light (VL) domain sequence comprises a sequence having at least 90% identity to the VL domain sequence of antibody IMPI-002, provided that the antibody has the CDRs of antibody IMPI-002.

[0144] In one embodiment, the variable heavy (VH) domain sequence comprises a sequence having at least 90% identity to the VH domain sequence of antibody IMPI-041 and the variable light (VL) domain sequence comprises a sequence having at least 90% identity to the VL domain sequence of antibody IMPI-041, provided that the antibody has the CDRs of antibody IMPI-041.

[0145] In one embodiment, the variable heavy (VH) domain sequence comprises a sequence having at least 90% identity to the VH domain sequence of antibody IMPI-036 and the variable light (VL) domain sequence comprises a sequence having at least 90% identity to the VL domain sequence of antibody IMPI-036, provided that the antibody has the CDRs of antibody IMPI-036.

[0146] In one embodiment, the variable heavy (VH) domain sequence comprises a sequence having at least 90% identity to the VH domain sequence of antibody IMPI-055 and the variable light (VL) domain sequence comprises a sequence having at least 90% identity to the VL domain sequence of antibody IMPI-055, provided that the antibody has the CDRs of antibody IMPI-055.

[0147] In one embodiment, the variable heavy (VH) domain sequence comprises a sequence having at least 90% identity to the VH domain sequence of antibody IMPI-054 and the variable light (VL) domain sequence comprises a sequence having at least 90% identity to the VL domain sequence of antibody IMPI-054, provided that the antibody has the CDRs of antibody IMPI-054.

[0148] In one embodiment, the variable heavy (VH) domain sequence comprises a sequence having at least 90% identity to the VH domain sequence of antibody IMPI-042 and the variable light (VL) domain sequence comprises a sequence having at least 90% identity to the VL domain sequence of antibody IMPI-042, provided that the antibody has the CDRs of antibody IMPI-042.

[0149] In one embodiment, the variable heavy (VH) domain sequence comprises a sequence having at least 90% identity to the VH domain sequence of antibody IMPI-021 and the variable light (VL) domain sequence comprises a sequence having at least 90% identity to the VL domain sequence of antibody IMPI-021, provided that the antibody has the CDRs of antibody IMPI-021.

[0150] In one embodiment, the variable heavy (VH) domain sequence comprises a sequence having at least 90% identity to the VH domain sequence of antibody IMPI-004 and the variable light (VL) domain sequence comprises a sequence having at least 90% identity to the VL domain sequence of antibody IMPI-004, provided that the antibody has the CDRs of antibody IMPI-004.

[0151] In one embodiment, the variable heavy (VH) domain sequence comprises a sequence having at least 90% identity to the VH domain sequence of antibody IMPI-047 and the variable light (VL) domain sequence comprises a sequence having at least 90% identity to the VL domain sequence of antibody IMPI-047, provided that the antibody has the CDRs of antibody IMPI-047.

[0152] In one embodiment, the variable heavy (VH) domain sequence comprises a sequence having at least 90% identity to the VH domain sequence of antibody IMPI-017 and the variable light (VL) domain sequence comprises a sequence having at least 90% identity to the VL domain sequence of antibody IMPI-017, provided that the antibody has the CDRs of antibody IMPI-017.

[0153] In one embodiment, the variable heavy (VH) domain sequence comprises a sequence having at least 90% identity to the VH domain sequence of antibody IMPI-059 and the variable light (VL) domain sequence comprises a sequence having at least 90% identity to the VL domain sequence of antibody IMPI-059, provided that the antibody has the CDRs of antibody IMPI-059.

[0154] In one embodiment, the variable heavy (VH) domain sequence comprises a sequence having at least 90% identity to the VH domain sequence of antibody IMPI-059 and the variable light (VL) domain sequence comprises a sequence having at least 90% identity to the VL domain sequence of antibody IMPI-060, provided that the antibody has the CDRs of antibody IMPI-060.

[0155] In one embodiment, the variable heavy (VH) domain sequence comprises a sequence having at least 90% identity to the VH domain sequence of antibody IMPI-059 and the variable light (VL) domain sequence comprises a sequence having at least 90% identity to the VL domain sequence of antibody IMPI-006, provided that the antibody has the CDRs of antibody IMPI-006.

[0156] In one embodiment, the variable heavy (VH) domain sequence comprises a sequence having at least 90% identity to the VH domain sequence of antibody IMPI-059 and the variable light (VL) domain sequence comprises a sequence having at least 90% identity to the VL domain sequence of antibody IMPI-037, provided that the antibody has the CDRs of antibody IMPI-037.

[0157] In one embodiment, the variable heavy (VH) domain sequence comprises a sequence having at least 90% identity to the VH domain sequence of antibody IMPI-028 and the variable light (VL) domain sequence comprises a sequence having at least 90% identity to the VL domain sequence of antibody IMPI-028, provided that the antibody has the CDRs of antibody IMPI-028.

[0158] In one embodiment, the antibody comprises a variable heavy (VH) domain sequence and a variable light (VL) domain sequence and wherein the variable heavy (VH) domain and variable light (VL) domain sequences respectively comprise the variable heavy (VH) and variable light (VL) domain sequences of antibody IMPI-029, IMPI-056, IMPI-005, IMPI-012, IMPI-052, IMPI-002, IMPI-041, IMPI-036, IMPI-055, IMPI-054, IMPI-042, IMPI-021, IMPI-060, IMPI-006, IMPI-004, IMPI-047, IMPI-037, IMPI-017, IMPI-059, or IMPI-028.

[0159] In one embodiment, the antibody comprises a variable heavy (VH) domain sequence and a variable light (VL) domain sequence and wherein the variable heavy (VH) domain and variable light (VL) domain sequences respectively comprise the variable heavy (VH) and variable light (VL) domain sequences of antibody IMPI-029, IMPI-056, IMPI-005, IMPI-012, IMPI-052, IMPI-002, IMPI-041, IMPI-036, IMPI-055, IMPI-054, IMPI-042, IMPI-021, IMPI-004, IMPI-047, IMPI-017, IMPI-059, or IMPI-028.

[0160] In one embodiment, the present invention provides an antibody that specifically binds to the receptor binding domain (RBD) of the SARS-CoV-2 spike protein,

wherein the antibody comprises a variable heavy (VH) domain sequence and a variable light (VL) domain sequence and wherein the variable heavy (VH) domain and variable light (VL) domain sequences respectively comprise the variable heavy (VH) and variable light (VL) domain sequences of antibody IMPI-029, IMPI-056, IMPI-005, IMPI-012, IMPI-052, IMPI-002, IMPI-041, IMPI-036, IMPI-055, IMPI-054, IMPI-042, IMPI-021, IMPI-060, IMPI-006, IMPI-004, IMPI-047, IMPI-037, IMPI-017, IMPI-059, or IMPI-028.

[0161] In one embodiment, the present invention provides an antibody that specifically binds to the receptor binding domain (RBD) of the SARS-CoV-2 spike protein,

wherein the antibody comprises a variable heavy (VH) domain sequence and a variable light (VL) domain sequence and wherein the variable heavy (VH) domain and variable light (VL) domain sequences respectively comprise the variable heavy (VH) and variable light (VL) domain sequences of antibody IMPI-029, IMPI-056, IMPI-005, IMPI-012, IMPI-052, IMPI-002, IMPI-041, IMPI-036, IMPI-055, IMPI-054, IMPI-042, IMPI-021, IMPI-004, IMPI-047, IMPI-017, IMPI-059, or IMPI-028.

[0162] In one embodiment, the antibody comprises the VH and VL domain sequences of antibody IMPI-029.

[0163] In one embodiment, the antibody comprises the VH and VL domain sequences of antibody IMPI-056.

[0164] In one embodiment, the antibody comprises the VH and VL domain sequences of antibody IMPI-005.

[0165] In one embodiment, the antibody comprises the VH and VL domain sequences of antibody IMPI-012.

[0166] In one embodiment, the antibody comprises the VH and VL domain sequences of antibody IMPI-052.

[0167] In one embodiment, the antibody comprises the VH and VL domain sequences of antibody IMPI-002.

[0168] In one embodiment, the antibody comprises the VH and VL domain sequences of antibody IMPI-041.

[0169] In one embodiment, the antibody comprises the VH and VL domain sequences of antibody IMPI-036.

[0170] In one embodiment, the antibody comprises the VH and VL domain sequences of antibody IMPI-055.

[0171] In one embodiment, the antibody comprises the VH and VL domain sequences of antibody IMPI-054.

[0172] In one embodiment, the antibody comprises the VH and VL domain sequences of antibody IMPI-042.

[0173] In one embodiment, the antibody comprises the VH and VL domain sequences of antibody IMPI-021.

[0174] In one embodiment, the antibody comprises the VH and VL domain sequences of antibody IMPI-004.

[0175] In one embodiment, the antibody comprises the VH and VL domain sequences of antibody IMPI-047.

[0176] In one embodiment, the antibody comprises the VH and VL domain sequences of antibody IMPI-017.

[0177] In one embodiment, the antibody comprises the VH and VL domain sequences of antibody IMPI-059.

[0178] In one embodiment, the antibody comprises the VH and VL domain sequences of antibody IMPI-060.

[0179] In one embodiment, the antibody comprises the VH and VL domain sequences of antibody IMPI-006.

[0180] In one embodiment, the antibody comprises the VH and VL domain sequences of antibody IMPI-037.

[0181] In one embodiment, the antibody comprises the VH and VL domain sequences of antibody IMPI-028.

[0182] An antibody of the present invention may be one which competes for binding to the SARS-CoV-2 spike protein with antibody IMPI-037.

[0183] In one embodiment, an antibody is provided which binds to the same epitope as antibody IMPI-037.

[0184] In one embodiment, the antibody comprises VH and/or VL domain framework regions of human germline gene segment sequences.

[0185] In one embodiment, the antibody comprises an antibody VH domain which

i) is derived from recombination of a human heavy chain V gene segment, a human heavy chain D gene segment and a human heavy chain J gene segment, wherein
[0186] the V gene segment is IGHV3-53*01, IGHV1-8*01 or IGHV3-33*01;
[0187] and/or
[0188] the J gene segment is IGHJ6*02, IGHJ4*02 or IGHJ3*02, or
   ii) comprises framework regions FR1, FR2, FR3 and FR4, wherein
[0189] FR1 aligns with human germline V gene segment IGHV3-53*01, IGHV1-8*01 or IGHV3-33*01 with up to 1, 2, 3, 4, or 5 amino acid alterations,
[0190] FR2 aligns with human germline V gene segment IGHV3-53*01, IGHV1-8*01 or IGHV3-33*01 with up to 1, 2, 3, 4, or 5 amino acid alterations,
[0191] FR3 aligns with human germline V gene segment IGHV3-53*01, IGHV1-8*01 or IGHV3-33*01 with up to 1, 2, 3, 4 or 5 amino acid alterations, and/or
[0192] FR4 aligns with human germline J gene segment IGHJ6*02, IGHJ4*02 or IGHJ3*02 with up to 1, 2, 3, 4 or 5 amino acid alterations.

[0193] In one embodiment, the antibody comprises an antibody VH domain which
[0194] i) is derived from recombination of a human heavy chain V gene segment IGHV3-53*01, IGHV1-8*01 or IGHV3-33*01, a human heavy chain D gene segment and a human heavy chain J gene segment, or
[0195] ii) comprises framework regions FR1, FR2, FR3 and FR4, wherein FR1, FR2 and FR3 each align with human germline V segment IGHV3-53*01, IGHV1-8*01 or IGHV3-33*01 with up to 1, 2, 3, 4 or 5 amino acid alterations.

[0196] In one embodiment, the J gene segment is IGHJ6*02, IGHJ4*02 or IGHJ3*02, or the VH domain framework region FR4 aligns with human germline J gene segment IGHJ6*02, IGHJ4*02 or IGHJ3*02 with 1, 2, 3, 4 or 5 amino acid alterations.

[0197] In one embodiment, the antibody comprises an antibody VL domain which
[0198] i) is derived from recombination of a human light chain V gene segment and a human light chain J gene segment, wherein the V gene segment is IGKV1-9*d01, IGKV6-21*01, IGKV1-33*01 or IGKV3-20*01, and/or the J gene segment is IGKJ5*01, IGKJ4*01, IGKJ3*01, IGKJ2*04 or IGKJ1*01; or
[0199] ii) comprises framework regions FR1, FR2, FR3 and FR4, wherein FR1 aligns with human germline V gene segment IGKV1-9*d01, IGKV6-21*01, IGKV1-33*01 or IGKV3-20*01 with up to 1, 2, 3, 4, or 5 amino acid alterations, FR2 aligns with human germline V gene segment IGKV1-9*d01, IGKV6-21*01, IGKV1-33*01 or IGKV3-20*01 with up to 1, 2, 3, 4, or 5 amino acid alterations FR3 aligns with human germline V gene segment IGKV1-9*d01, IGKV6-21*01, IGKV1-33*01 or IGKV3-20*01 with up to 1, 2, 3, 4 or 5 amino acid alterations, and/or FR4 aligns with human germline J gene segment IGKJ5*01, IGKJ4*01, IGKJ3*01, IGKJ2*04 or IGKJ1*01 with up to 1, 2, 3, 4 or 5 amino acid alterations.

[0200] In one embodiment, the antibody comprises an antibody VL domain derived from recombination of a human light chain V gene segment and a human light chain J gene segment, wherein: the V gene segment is IGKV1-9*d01, IGKV6-21*01, IGKV1-33*01 or IGKV3-20*01, and optionally the J gene segment is IGKJ5*01, IGKJ4*01, IGKJ3*01, IGKJ2*04 or IGKJ1*01.

[0201] Example combinations of v and j gene segments for heavy and light chain variable domains are shown in Table 3, and these represent preferred combinations. The heavy and light chain variable domains may optionally be derived from the v and j gene segments identified in Table 3 for any one individual IMPI antibody identified in this Group A section.

### Further Competing RBD Binders

[0202] According to the first aspect of the invention, further antibodies are provided herein which specifically bind to the RBD of the SARS-CoV-2 spike protein and compete for binding to the SARS-CoV-2 spike protein with the human ACE2 receptor. For example, antibodies YANG-1101, YANG-1103, YANG-1105, YANG-1106, YANG-1107, YANG-1108, YANG-1109, YANG-1110, YANG-1112, YANG-1112a, YANG-1112b, YANG-1112c, YANG-1113, YANG-1114, YANG-1115, YANG-1116, YANG-1117, YANG-1118, YANG-1119, YANG-2101, YANG-2102, YANG-2103, YANG-2104, YANG-2105, YANG-2106, YANG-2107, YANG-2108, YANG-2108a, YANG-2108b, YANG-2108c, YANG-2108d, YANG-2108e, YANG-2108f, YANG-2108g, YANG-2108h, YANG-2108i, YANG-2108j, YANG-2108k, YANG-21081, YANG-2109, YANG-2110, and YANG-2111 as exemplified herein have been found to specifically bind to the RBD of the SARS-CoV-2 spike protein and to compete for binding to the SARS-CoV-2 spike protein with the human ACE2 receptor.

[0203] In one embodiment, the antibody comprises a variable heavy (VH) domain sequence comprising complementarity determining regions (CDRs) HCDR1, HCDR2 and HCDR3, and a variable light (VL) domain sequence comprising complementarity determining regions LCDR1, LCDR2 and LCDR3, wherein the HCDR3 is the HCDR3 of antibody YANG-1101, YANG-1103, YANG-1105, YANG-1106, YANG-1107, YANG-1108, YANG-1109, YANG-1110, YANG-1112, YANG-1112a, YANG-1112b, YANG-1112c, YANG-1113, YANG-1114, YANG-1115, YANG-1116, YANG-1117, YANG-1118, YANG-1119, YANG-2101, YANG-2102, YANG-2103, YANG-2104, YANG-2105, YANG-2106, YANG-2107, YANG-2108, YANG-2108a, YANG-2108b, YANG-2108c, YANG-2108d, YANG-2108e, YANG-2108f, YANG-2108g, YANG-2108h, YANG-2108i, YANG-2108j, YANG-2108k, YANG-21081, YANG-2109, YANG-2110, or YANG-2111.

[0204] In one embodiment, the antibody comprises a variable heavy (VH) domain sequence comprising complementarity determining regions (CDRs) HCDR1, HCDR2 and HCDR3, and a variable light (VL) domain sequence comprising complementarity determining regions LCDR1, LCDR2 and LCDR3, wherein HCDR3 is the HCDR3 of antibody YANG-1112, YANG-2107, YANG-2108, or YANG-2111.

[0205] In one embodiment, HCDR3 is the HCDR3 of antibody YANG-1101.

[0206] In one embodiment, HCDR3 is the HCDR3 of antibody YANG-1103.

[0207] In one embodiment, HCDR3 is the HCDR3 of antibody YANG-1105.

[0208] In one embodiment, HCDR3 is the HCDR3 of antibody YANG-1106.

[0209] In one embodiment, HCDR3 is the HCDR3 of antibody YANG-1107.

[0210] In one embodiment, HCDR3 is the HCDR3 of antibody YANG-1108.

[0211] In one embodiment, HCDR3 is the HCDR3 of antibody YANG-1109.

[0212] In one embodiment, HCDR3 is the HCDR3 of antibody YANG-1110.

[0213] In one embodiment, HCDR3 is the HCDR3 of antibody YANG-1112.

[0214] In one embodiment, HCDR3 is the HCDR3 of antibody YANG-1113.

[0215] In one embodiment, HCDR3 is the HCDR3 of antibody YANG-1114.

[0216] In one embodiment, HCDR3 is the HCDR3 of antibody YANG-1115.

[0217] In one embodiment, HCDR3 is the HCDR3 of antibody YANG-1116.

[0218] In one embodiment, HCDR3 is the HCDR3 of antibody YANG-1117.

[0219] In one embodiment, HCDR3 is the HCDR3 of antibody YANG-1118.

[0220] In one embodiment, HCDR3 is the HCDR3 of antibody YANG-1119.

[0221] In one embodiment, HCDR3 is the HCDR3 of antibody YANG-2101.

[0222] In one embodiment, HCDR3 is the HCDR3 of antibody YANG-2102.

[0223] In one embodiment, HCDR3 is the HCDR3 of antibody YANG-2103.

[0224] In one embodiment, HCDR3 is the HCDR3 of antibody YANG-2104.

[0225] In one embodiment, HCDR3 is the HCDR3 of antibody YANG-2105.

[0226] In one embodiment, HCDR3 is the HCDR3 of antibody YANG-2106.

[0227] In one embodiment, HCDR3 is the HCDR3 of antibody YANG-2107.

[0228] In one embodiment, HCDR3 is the HCDR3 of antibody YANG-2108.

[0229] In one embodiment, HCDR3 is the HCDR3 of antibody YANG-2109.

[0230] In one embodiment, HCDR3 is the HCDR3 of antibody YANG-2110.

[0231] In one embodiment, HCDR3 is the HCDR3 of antibody YANG-2111.

[0232] In one embodiment, the antibody specifically binds to the RBD of the SARS-CoV-2 spike protein and competes for binding to the SARS-CoV-2 spike protein with the human ACE2 receptor, and HCDR3 is the HCDR3 of antibody YANG-1101, YANG-1103, YANG-1105, YANG-1106, YANG-1107, YANG-1108, YANG-1109, YANG-1110, YANG-1112, YANG-1112a, YANG-1112b, YANG-1112c, YANG-1113, YANG-1114, YANG-1115, YANG-1116, YANG-1117, YANG-1118, YANG-1119, YANG-2101, YANG-2102, YANG-2103, YANG-2104, YANG-2105, YANG-2106, YANG-2107, YANG-2108, YANG-2108a, YANG-2108b, YANG-2108c, YANG-2108d, YANG-2108e, YANG-2108f, YANG-2108g, YANG-2108h, YANG-2108i, YANG-2108j, YANG-2108k, YANG-21081, YANG-2109, YANG-2110, or YANG-2111.

[0233] In one embodiment, the antibody specifically binds to the RBD of the SARS-CoV-2 spike protein with a KD of 0.1 nM or lower (e.g. as measured by surface plasmon resonance (SPR)) and competes for binding to the SARS-CoV-2 spike protein with the human ACE2 receptor, and HCDR3 is the HCDR3 of antibody YANG-1101, YANG-1103, YANG-1105, YANG-1106, YANG-1107, YANG-1108, YANG-1109, YANG-1110, YANG-1112, YANG-1112a, YANG-1112b, YANG-1112c, YANG-1113, YANG-1114, YANG-1115, YANG-1116, YANG-1117, YANG-1118, YANG-1119, YANG-2101, YANG-2102, YANG-2103, YANG-2104, YANG-2105, YANG-2106, YANG-2107, YANG-2108, YANG-2108a, YANG-2108b, YANG-2108c, YANG-2108d, YANG-2108e, YANG-2108f, YANG-2108g, YANG-2108h, YANG-2108i, YANG-2108j, YANG-2108k, YANG-21081, YANG-2109, YANG-2110, or YANG-2111.

[0234] In one embodiment, the antibody binds the isolated RBD of the SARS-CoV-2 spike protein with a KD of 0.1 nM or lower (e.g. as measured by surface plasmon resonance (SPR)) and HCDR3 is the HCDR3 of antibody YANG-1112, YANG-2107, YANG-2108, or YANG-2111.

[0235] In one embodiment, the antibody specifically binds to the S2 subunit of the SARS-CoV-2 spike protein and neutralises SARS-CoV-2 with at least 60% neutralisation (e.g. as measured in a pseudovirus neutralisation assay), and HCDR3 is the HCDR3 of antibody YANG-1112, YANG-2107, YANG-2108, or YANG-2111.

[0236] In one embodiment, the antibody specifically binds to the S2 subunit of the SARS-CoV-2 spike protein with a KD of 0.1 nM or lower (e.g. as measured by surface plasmon resonance (SPR)) and neutralises SARS-CoV-2 with at least 60% neutralisation (e.g. as measured in a pseudovirus neutralisation assay), and HCDR3 is the HCDR3 of antibody YANG-1112, YANG-2107, YANG-2108, or YANG-2111.

[0237] In one embodiment, the present invention provides an anti-SARS-CoV-2 antibody, wherein the antibody comprises a variable heavy (VH) domain sequence comprising complementarity determining regions (CDRs) HCDR1, HCDR2, and HCDR3, and a variable light (VL) domain sequence comprising complementarity determining regions LCDR1, LCDR2 and LCDR3, wherein the CDRs are those of antibody YANG-1101, YANG-1103, YANG-1105, YANG-1106, YANG-1107, YANG-1108, YANG-1109, YANG-1110, YANG-1112, YANG-1112a, YANG-1112b, YANG-1112c, YANG-1113, YANG-1114, YANG-1115, YANG-1116, YANG-1117, YANG-1118, YANG-1119, YANG-2101, YANG-2102, YANG-2103, YANG-2104, YANG-2105, YANG-2106, YANG-2107, YANG-2108, YANG-2108a, YANG-2108b, YANG-2108c, YANG-2108d, YANG-2108e, YANG-2108f, YANG-2108g, YANG-2108h, YANG-2108i, YANG-2108j, YANG-2108k, YANG-21081, YANG-2109, YANG-2110, or YANG-2111.

[0238] In one embodiment, the present invention provides an anti-SARS-CoV-2 antibody, wherein the antibody comprises a variable heavy (VH) domain sequence comprising complementarity determining regions (CDRs) HCDR1, HCDR2, and HCDR3, and a variable light (VL) domain sequence comprising complementarity determining regions LCDR1, LCDR2 and LCDR3, wherein the CDRs are those of antibody YANG-1112, YANG-2107, YANG-2108, or YANG-2111.

[0239] In one embodiment, the antibody has the CDRs of antibody YANG-1101.

[0240] In one embodiment, the antibody has the CDRs of antibody YANG-1103.

[0241] In one embodiment, the antibody has the CDRs of antibody YANG-1105.

[0242] In one embodiment, the antibody has the CDRs of antibody YANG-1106.

[0243] In one embodiment, the antibody has the CDRs of antibody YANG-1107.

[0244] In one embodiment, the antibody has the CDRs of antibody YANG-1108.

[0245] In one embodiment, the antibody has the CDRs of antibody YANG-1109.

[0246] In one embodiment, the antibody has the CDRs of antibody YANG-1110.

[0247] In one embodiment, the antibody has the CDRs of antibody YANG-1112.

[0248] In one embodiment, the antibody has the CDRs of antibody YANG-1113.

[0249] In one embodiment, the antibody has the CDRs of antibody YANG-1114.

[0250] In one embodiment, the antibody has the CDRs of antibody YANG-1115.

[0251] In one embodiment, the antibody has the CDRs of antibody YANG-1116.

[0252] In one embodiment, the antibody has the CDRs of antibody YANG-1117.

[0253] In one embodiment, the antibody has the CDRs of antibody YANG-1118.

[0254] In one embodiment, the antibody has the CDRs of antibody YANG-1119.

[0255] In one embodiment, the antibody has the CDRs of antibody YANG-2101.

[0256] In one embodiment, the antibody has the CDRs of antibody YANG-2102.

[0257] In one embodiment, the antibody has the CDRs of antibody YANG-2103.

[0258] In one embodiment, the antibody has the CDRs of antibody YANG-2104.

[0259] In one embodiment, the antibody has the CDRs of antibody YANG-2105.

[0260] In one embodiment, the antibody has the CDRs of antibody YANG-2106.

[0261] In one embodiment, the antibody has the CDRs of antibody YANG-2107.

[0262] In one embodiment, the antibody has the CDRs of antibody YANG-2108.

[0263] In one embodiment, the antibody has the CDRs of antibody YANG-2109.

[0264] In one embodiment, the antibody has the CDRs of antibody YANG-2110.

[0265] In one embodiment, the antibody has the CDRs of antibody YANG-2111.

[0266] In one embodiment, the antibody specifically binds to the RBD of the SARS-CoV-2 spike protein and competes for binding to the SARS-CoV-2 spike protein with the human ACE2 receptor, and the CDRs are those of antibody YANG-1101, YANG-1103, YANG-1105, YANG-1106, YANG-1107, YANG-1108, YANG-1109, YANG-1110, YANG-1112, YANG-1112a, YANG-1112b, YANG-1112c, YANG-1113, YANG-1114, YANG-1115, YANG-1116, YANG-1117, YANG-1118, YANG-1119, YANG-2101, YANG-2102, YANG-2103, YANG-2104, YANG-2105, YANG-2106, YANG-2107, YANG-2108, YANG-2108a, YANG-2108b, YANG-2108c, YANG-2108d, YANG-2108e, YANG-2108f, YANG-2108g, YANG-2108h, YANG-2108i, YANG-2108j, YANG-2108k, YANG-21081, YANG-2109, YANG-2110, or YANG-2111.

[0267] In one embodiment, the antibody specifically binds to the RBD of the SARS-CoV-2 spike protein with a KD of 0.1 nM or lower (e.g. as measured by surface plasmon resonance (SPR)) and competes for binding to the SARS-CoV-2 spike protein with the human ACE2 receptor, and the CDRs are those of antibody YANG-1101, YANG-1103, YANG-1105, YANG-1106, YANG-1107, YANG-1108, YANG-1109, YANG-1110, YANG-1112, YANG-1112a, YANG-1112b, YANG-1112c, YANG-1113, YANG-1114, YANG-1115, YANG-1116, YANG-1117, YANG-1118, YANG-1119, YANG-2101, YANG-2102, YANG-2103, YANG-2104, YANG-2105, YANG-2106, YANG-2107, YANG-2108, YANG-2108a, YANG-2108b, YANG-2108c, YANG-2108d, YANG-2108e, YANG-2108f, YANG-2108g, YANG-2108h, YANG-2108i, YANG-2108j, YANG-2108k, YANG-21081, YANG-2109, YANG-2110, or YANG-2111.

[0268] In one embodiment, the antibody specifically binds to the RBD of the SARS-CoV-2 spike protein and competes for binding to the SARS-CoV-2 spike protein with the human ACE2 receptor, and the CDRs are those of antibody YANG-1112, YANG-2107, YANG-2108, or YANG-2111.

[0269] In one embodiment, the antibody specifically binds to the RBD of the SARS-CoV-2 spike protein with a KD of 0.1 nM or lower (e.g. as measured by surface plasmon resonance (SPR)) and competes for binding to the SARS-CoV-2 spike protein with the human ACE2 receptor, and the CDRs are those of antibody YANG-1112, YANG-2107, YANG-2108, or YANG-2111.

[0270] In one embodiment, the antibody specifically binds to the S2 subunit of the SARS-CoV-2 spike protein and competes for binding to the SARS-CoV-2 spike protein with the human ACE2 receptor and neutralises SARS-CoV-2 with at least 60% neutralisation (e.g. as measured in a pseudovirus neutralisation assay), and the CDRs are those of antibody YANG-1112, YANG-2107, YANG-2108, or YANG-2111.

[0271] In one embodiment, the antibody specifically binds to the S2 subunit of the SARS-CoV-2 spike protein with a KD of 0.1 nM or lower (e.g. as measured by surface plasmon resonance (SPR)) and competes for binding to the SARS-CoV-2 spike protein with the human ACE2 receptor and neutralises SARS-CoV-2 with at least 60% neutralisation (e.g. as measured in a pseudovirus neutralisation assay), and the CDRs are those of antibody YANG-1112, YANG-2107, YANG-2108, or YANG-2111.

[0272] In one embodiment, the antibody comprises a variable heavy (VH) domain sequence and a variable light (VL) domain sequence and wherein the variable heavy (VH) domain and variable light (VL) domain sequences respectively comprise the variable heavy (VH) domain and variable light (VL) domain sequences of antibody YANG-1101, YANG-1103, YANG-1105, YANG-1106, YANG-1107, YANG-1108, YANG-1109, YANG-1110, YANG-1112, YANG-1112a, YANG-1112b, YANG-1112c, YANG-1113, YANG-1114, YANG-1115, YANG-1116, YANG-1117, YANG-1118, YANG-1119, YANG-2101, YANG-2102, YANG-2103, YANG-2104, YANG-2105, YANG-2106, YANG-2107, YANG-2108, YANG-2108a, YANG-2108b, YANG-2108c, YANG-2108d, YANG-2108e, YANG-2108f, YANG-2108g, YANG-2108h, YANG-2108i, YANG-2108j, YANG-2108k, YANG-21081, YANG-2109, YANG-2110, or YANG-2111, YANG-2111a, YANG-2111b, optionally with 1, 2, 3, 4 or 5 amino acid alterations outside the complementarity determining regions (CDRs) in the variable heavy (VH) domain sequence and optionally with 1, 2, 3, 4 or 5 amino acid alterations outside the complementarity determining regions (CDRs) in the variable light (VL) domain sequence.

[0273] In one embodiment, the antibody comprises a variable heavy (VH) domain sequence and a variable light (VL) domain sequence and wherein the variable heavy (VH) domain and variable light (VL) domain sequences respectively comprise the variable heavy (VH) domain and variable light (VL) domain sequences of antibody YANG-1112, YANG-2107, YANG-2108, or YANG-2111 optionally with 1, 2, 3, 4 or 5 amino acid alterations outside the complementarity determining regions (CDRs) in the variable heavy (VH) domain sequence and optionally with 1, 2, 3, 4 or 5 amino acid alterations outside the complementarity determining regions (CDRs) in the variable light (VL) domain sequence.

[0274] In one embodiment, the antibody comprises a variable heavy (VH) domain sequence of antibody YANG-1101, optionally with 1, 2, 3, 4 or 5 amino acid alterations outside the complementarity determining regions (CDRs), and a variable light (VL) domain sequence of antibody YANG-1101 optionally with 1, 2, 3, 4 or 5 amino acid alterations outside the complementarity determining regions (CDRs).

[0275] In one embodiment, the antibody comprises a variable heavy (VH) domain sequence of antibody YANG-1103, optionally with 1, 2, 3, 4 or 5 amino acid alterations outside the complementarity determining regions (CDRs), and a variable light (VL) domain sequence of antibody YANG-1103, optionally with 1, 2, 3, 4 or 5 amino acid alterations outside the complementarity determining regions (CDRs).

[0276] In one embodiment, the antibody comprises a variable heavy (VH) domain sequence of antibody YANG-1105, optionally with 1, 2, 3, 4 or 5 amino acid alterations outside the complementarity determining regions (CDRs), and a variable light (VL) domain sequence of antibody YANG-1105, optionally with 1, 2, 3, 4 or 5 amino acid alterations outside the complementarity determining regions (CDRs).

[0277] In one embodiment, the antibody comprises a variable heavy (VH) domain sequence of antibody YANG-1106, optionally with 1, 2, 3, 4 or 5 amino acid alterations outside the complementarity determining regions (CDRs), and a variable light (VL) domain sequence of antibody YANG-1106, optionally with 1, 2, 3, 4 or 5 amino acid alterations outside the complementarity determining regions (CDRs).

[0278] In one embodiment, the antibody comprises a variable heavy (VH) domain sequence of antibody YANG-1107, optionally with 1, 2, 3, 4 or 5 amino acid alterations outside the complementarity determining regions (CDRs), and a variable light (VL) domain sequence of antibody YANG-1107, optionally with 1, 2, 3, 4 or 5 amino acid alterations outside the complementarity determining regions (CDRs).

[0279] In one embodiment, the antibody comprises a variable heavy (VH) domain sequence of antibody YANG-1108, optionally with 1, 2, 3, 4 or 5 amino acid alterations outside the complementarity determining regions (CDRs), and a variable light (VL) domain sequence of antibody YANG-1108, optionally with 1, 2, 3, 4 or 5 amino acid alterations outside the complementarity determining regions (CDRs).

[0280] In one embodiment, the antibody comprises a variable heavy (VH) domain sequence of antibody YANG-1109, optionally with 1, 2, 3, 4 or 5 amino acid alterations outside the complementarity determining regions (CDRs), and a variable light (VL) domain sequence of antibody YANG-1109, optionally with 1, 2, 3, 4 or 5 amino acid alterations outside the complementarity determining regions (CDRs).

[0281] In one embodiment, the antibody comprises a variable heavy (VH) domain sequence of antibody YANG-1110 optionally with 1, 2, 3, 4 or 5 amino acid alterations outside the complementarity determining regions (CDRs), and a variable light (VL) domain sequence of antibody YANG-1110, optionally with 1, 2, 3, 4 or 5 amino acid alterations outside the complementarity determining regions (CDRs).

[0282] In one embodiment, the antibody comprises a variable heavy (VH) domain sequence of antibody YANG-1112 optionally with 1, 2, 3, 4 or 5 amino acid alterations outside the complementarity determining regions (CDRs), and a variable light (VL) domain sequence of antibody YANG-1112, optionally with 1, 2, 3, 4 or 5 amino acid alterations outside the complementarity determining regions (CDRs).

[0283] In one embodiment, the antibody comprises a variable heavy (VH) domain sequence of antibody YANG-1113 optionally with 1, 2, 3, 4 or 5 amino acid alterations outside the complementarity determining regions (CDRs), and a variable light (VL) domain sequence of antibody YANG-1113, optionally with 1, 2, 3, 4 or 5 amino acid alterations outside the complementarity determining regions (CDRs).

[0284] In one embodiment, the antibody comprises a variable heavy (VH) domain sequence of antibody YANG-1114 optionally with 1, 2, 3, 4 or 5 amino acid alterations outside the complementarity determining regions (CDRs), and a variable light (VL) domain sequence of antibody YANG-1114, optionally with 1, 2, 3, 4 or 5 amino acid alterations outside the complementarity determining regions (CDRs).

[0285] In one embodiment, the antibody comprises a variable heavy (VH) domain sequence of antibody YANG-1115 optionally with 1, 2, 3, 4 or 5 amino acid alterations outside the complementarity determining regions (CDRs), and a variable light (VL) domain sequence of antibody YANG-1115, optionally with 1, 2, 3, 4 or 5 amino acid alterations outside the complementarity determining regions (CDRs).

[0286] In one embodiment, the antibody comprises a variable heavy (VH) domain sequence of antibody YANG-1116 optionally with 1, 2, 3, 4 or 5 amino acid alterations outside the complementarity determining regions (CDRs), and a variable light (VL) domain sequence of antibody YANG-1116, optionally with 1, 2, 3, 4 or 5 amino acid alterations outside the complementarity determining regions (CDRs).

[0287] In one embodiment, the antibody comprises a variable heavy (VH) domain sequence of antibody YANG-1117 optionally with 1, 2, 3, 4 or 5 amino acid alterations outside the complementarity determining regions (CDRs), and a variable light (VL) domain sequence of antibody YANG-1117, optionally with 1, 2, 3, 4 or 5 amino acid alterations outside the complementarity determining regions (CDRs).

[0288] In one embodiment, the antibody comprises a variable heavy (VH) domain sequence of antibody YANG-1118 optionally with 1, 2, 3, 4 or 5 amino acid alterations outside the complementarity determining regions (CDRs), and a variable light (VL) domain sequence of antibody YANG-1118, optionally with 1, 2, 3, 4 or 5 amino acid alterations outside the complementarity determining regions (CDRs).

[0289] In one embodiment, the antibody comprises a variable heavy (VH) domain sequence of antibody YANG-1119 optionally with 1, 2, 3, 4 or 5 amino acid alterations outside the complementarity determining regions (CDRs), and a variable light (VL) domain sequence of antibody YANG-1119, optionally with 1, 2, 3, 4 or 5 amino acid alterations outside the complementarity determining regions (CDRs).

[0290] In one embodiment, the antibody comprises a variable heavy (VH) domain sequence of antibody YANG-2101, optionally with 1, 2, 3, 4 or 5 amino acid alterations outside the complementarity determining regions (CDRs), and a variable light (VL) domain sequence of antibody YANG-2101, optionally with 1, 2, 3, 4 or 5 amino acid alterations outside the complementarity determining regions (CDRs).

[0291] In one embodiment, the antibody comprises a variable heavy (VH) domain sequence of antibody YANG-2102, optionally with 1, 2, 3, 4 or 5 amino acid alterations outside the complementarity determining regions (CDRs), and a variable light (VL) domain sequence of antibody YANG-2102, optionally with 1, 2, 3, 4 or 5 amino acid alterations outside the complementarity determining regions (CDRs).

[0292] In one embodiment, the antibody comprises a variable heavy (VH) domain sequence of antibody YANG-2103, optionally with 1, 2, 3, 4 or 5 amino acid alterations outside the complementarity determining regions (CDRs), and a variable light (VL) domain sequence of antibody YANG-2103, optionally with 1, 2, 3, 4 or 5 amino acid alterations outside the complementarity determining regions (CDRs).

[0293] In one embodiment, the antibody comprises a variable heavy (VH) domain sequence of antibody YANG-2104, optionally with 1, 2, 3, 4 or 5 amino acid alterations outside the complementarity determining regions (CDRs), and a variable light (VL) domain sequence of antibody YANG-2104, optionally with 1, 2, 3, 4 or 5 amino acid alterations outside the complementarity determining regions (CDRs).

[0294] In one embodiment, the antibody comprises a variable heavy (VH) domain sequence of antibody YANG-2105, optionally with 1, 2, 3, 4 or 5 amino acid alterations outside the complementarity determining regions (CDRs), and a variable light (VL) domain sequence of antibody YANG-2105, optionally with 1, 2, 3, 4 or 5 amino acid alterations outside the complementarity determining regions (CDRs).

[0295] In one embodiment, the antibody comprises a variable heavy (VH) domain sequence of antibody YANG-2106, optionally with 1, 2, 3, 4 or 5 amino acid alterations outside the complementarity determining regions (CDRs), and a variable light (VL) domain sequence of antibody YANG-2106, optionally with 1, 2, 3, 4 or 5 amino acid alterations outside the complementarity determining regions (CDRs).

[0296] In one embodiment, the antibody comprises a variable heavy (VH) domain sequence of antibody YANG-2107, optionally with 1, 2, 3, 4 or 5 amino acid alterations outside the complementarity determining regions (CDRs), and a variable light (VL) domain sequence of antibody YANG-2107, optionally with 1, 2, 3, 4 or 5 amino acid alterations outside the complementarity determining regions (CDRs).

[0297] In one embodiment, the antibody comprises a variable heavy (VH) domain sequence of antibody YANG-2108, optionally with 1, 2, 3, 4 or 5 amino acid alterations outside the complementarity determining regions (CDRs), and a variable light (VL) domain sequence of antibody YANG-2108, optionally with 1, 2, 3, 4 or 5 amino acid alterations outside the complementarity determining regions (CDRs).

[0298] In one embodiment, the antibody comprises a variable heavy (VH) domain sequence of antibody YANG-2109, optionally with 1, 2, 3, 4 or 5 amino acid alterations outside the complementarity determining regions (CDRs), and a variable light (VL) domain sequence of antibody YANG-2109, optionally with 1, 2, 3, 4 or 5 amino acid alterations outside the complementarity determining regions (CDRs).

[0299] In one embodiment, the antibody comprises a variable heavy (VH) domain sequence of antibody YANG-2110, optionally with 1, 2, 3, 4 or 5 amino acid alterations outside the complementarity determining regions (CDRs), and a variable light (VL) domain sequence of antibody YANG-2110, optionally with 1, 2, 3, 4 or 5 amino acid alterations outside the complementarity determining regions (CDRs).

[0300] In one embodiment, the antibody comprises a variable heavy (VH) domain sequence of antibody YANG-2111, optionally with 1, 2, 3, 4 or 5 amino acid alterations outside the complementarity determining regions (CDRs), and a variable light (VL) domain sequence of antibody YANG-2111, optionally with 1, 2, 3, 4 or 5 amino acid alterations outside the complementarity determining regions (CDRs).

[0301] In one embodiment, the antibody specifically binds to the RBD of the SARS-CoV-2 spike protein and competes for binding to the SARS-CoV-2 spike protein with the human ACE2 receptor, and the variable heavy (VH) domain and variable light (VL) domain sequences respectively comprise the variable heavy (VH) domain and variable light (VL) domain sequences of antibody YANG-1101, YANG-1103, YANG-1105, YANG-1106, YANG-1107, YANG-1108, YANG-1109, YANG-1110, YANG-1112, YANG-1112a, YANG-1112b, YANG-1112c, YANG-1113, YANG-1114, YANG-1115, YANG-1116, YANG-1117, YANG-1118, YANG-1119, YANG-2101, YANG-2102, YANG-2103, YANG-2104, YANG-2105, YANG-2106, YANG-2107, YANG-2108, YANG-2108a, YANG-2108b, YANG-2108c, YANG-2108d, YANG-2108e, YANG-2108f, YANG-2108g, YANG-2108h, YANG-2108i, YANG-2108j, YANG-2108k, YANG-21081, YANG-2109, YANG-2110, orYANG-2111, YANG-2111a, YANG-2111b, optionally with 1, 2, 3, 4 or 5 amino acid alterations outside the complementarity determining regions (CDRs) in the variable heavy (VH) domain sequence and optionally with 1, 2, 3, 4 or 5 amino acid alterations outside the complementarity determining regions (CDRs) in the variable light (VL) domain sequence.

[0302] In one embodiment, the antibody specifically binds to the RBD of the SARS-CoV-2 spike protein with a KD of 0.1 nM or lower (e.g. as measured by surface plasmon resonance (SPR)) and competes for binding to the SARS-CoV-2 spike protein with the human ACE2 receptor, and the variable heavy (VH) domain and variable light (VL) domain sequences respectively comprise the variable heavy (VH) domain and variable light (VL) domain sequences of antibody YANG-1101, YANG-1103, YANG-1105, YANG-1106, YANG-1107, YANG-1108, YANG-1109, YANG-1110, YANG-1112, YANG-1112a, YANG-1112b, YANG-1112c, YANG-1113, YANG-1114, YANG-1115, YANG-1116, YANG-1117, YANG-1118, YANG-1119, YANG-2101, YANG-2102, YANG-2103, YANG-2104, YANG-2105, YANG-2106, YANG-2107, YANG-2108, YANG-2108a, YANG-2108b, YANG-2108c, YANG-2108d, YANG-2108e, YANG-2108f, YANG-2108g, YANG-2108h, YANG-2108i, YANG-2108j, YANG-2108k, YANG-21081, YANG-2109, YANG-2110, orYANG-2111, YANG-2111a, YANG-2111, optionally with 1, 2, 3, 4 or 5 amino acid alterations outside the complementarity determining regions (CDRs) in the variable heavy (VH) domain sequence and optionally with 1, 2, 3, 4 or 5 amino acid alterations outside the complementarity determining regions (CDRs) in the variable light (VL) domain sequence.

[0303] In one embodiment, the antibody specifically binds to the RBD of the SARS-CoV-2 spike protein and competes for binding to the SARS-CoV-2 spike protein with the human ACE2 receptor, and the variable heavy (VH) domain and variable light (VL) domain sequences respectively comprise the variable heavy (VH) domain and variable light (VL) domain sequences of antibody YANG-1112, YANG-2107, YANG-2108, or YANG-2111, optionally with 1, 2, 3, 4 or 5 amino acid alterations outside the complementarity determining regions (CDRs) in the variable heavy (VH) domain sequence and optionally with 1, 2, 3, 4 or 5 amino acid alterations outside the complementarity determining regions (CDRs) in the variable light (VL) domain sequence.

[0304] In one embodiment, the antibody specifically binds to the RBD of the SARS-CoV-2 spike protein with a KD of 0.1 nM or lower (e.g. as measured by surface plasmon resonance (SPR)) and competes for binding to the SARS-CoV-2 spike protein with the human ACE2 receptor, and the variable heavy (VH) domain and variable light (VL) domain sequences respectively comprise the variable heavy (VH) domain and variable light (VL) domain sequences of antibody YANG-1112, YANG-2107, YANG-2108, or YANG-2111, optionally with 1, 2, 3, 4 or 5 amino acid alterations outside the complementarity determining regions (CDRs) in the variable heavy (VH) domain sequence and optionally with 1, 2, 3, 4 or 5 amino acid alterations outside the complementarity determining regions (CDRs) in the variable light (VL) domain sequence.

[0305] In one embodiment, the antibody specifically binds to the S2 subunit of the SARS-CoV-2 spike protein and competes for binding to the SARS-CoV-2 spike protein with the human ACE2 receptor and neutralises SARS-CoV-2 with at least 60% neutralisation (e.g. as measured in a pseudovirus neutralisation assay), and the variable heavy (VH) domain and variable light (VL) domain sequences respectively comprise the variable heavy (VH) domain and variable light (VL) domain sequences of antibody YANG-1112, YANG-2107, YANG-2108, or YANG-2111, optionally with 1, 2, 3, 4 or 5 amino acid alterations outside the complementarity determining regions (CDRs) in the variable heavy (VH) domain sequence and optionally with 1, 2, 3, 4 or 5 amino acid alterations outside the complementarity determining regions (CDRs) in the variable light (VL) domain sequence.

[0306] In one embodiment, the antibody specifically binds to the S2 subunit of the SARS-CoV-2 spike protein with a KD of 0.1 nM or lower (e.g. as measured by surface plasmon resonance (SPR)) and competes for binding to the SARS-CoV-2 spike protein with the human ACE2 receptor and neutralises SARS-CoV-2 with at least 60% neutralisation (e.g. as measured in a pseudovirus neutralisation assay), and the variable heavy (VH) domain and variable light (VL) domain sequences respectively comprise the variable heavy (VH) domain and variable light (VL) domain sequences of antibody YANG-1112, YANG-2107, YANG-2108, or YANG-2111, optionally with 1, 2, 3, 4 or 5 amino acid alterations outside the complementarity determining regions (CDRs) in the variable heavy (VH) domain sequence and optionally with 1, 2, 3, 4 or 5 amino acid alterations outside the complementarity determining regions (CDRs) in the variable light (VL) domain sequence.

[0307] In one embodiment, the antibody comprises a variable heavy (VH) domain sequence and a variable light (VL) domain sequence and wherein the variable heavy (VH) domain and variable light (VL) domain sequences respectively comprise a sequence having at least 90% identity to the variable heavy (VH) and variable light (VL) domain sequences of antibody YANG-1101, YANG-1103, YANG-1105, YANG-1106, YANG-1107, YANG-1108, YANG-1109, YANG-1110, YANG-1112, YANG-1112a, YANG-1112b, YANG-1112c, YANG-1113, YANG-1114, YANG-1115, YANG-1116, YANG-1117, YANG-1118, YANG-1119, YANG-2101, YANG-2102, YANG-2103, YANG-2104, YANG-2105, YANG-2106, YANG-2107, YANG-2108, YANG-2108a, YANG-2108b, YANG-2108c, YANG-2108d, YANG-2108e, YANG-2108f, YANG-2108g, YANG-2108h, YANG-2108i, YANG-2108j, YANG-2108k, YANG-21081, YANG-2109, YANG-2110, or YANG-2111 provided that the antibody has the CDRs of antibody YANG-1101, YANG-1103, YANG-1105, YANG-1106, YANG-1107, YANG-1108, YANG-1109, YANG-1110, YANG-1112, YANG-1112a, YANG-1112b, YANG-1112c, YANG-1113, YANG-1114, YANG-1115, YANG-1116, YANG-1117, YANG-1118, YANG-1119, YANG-2101, YANG-2102, YANG-2103, YANG-2104, YANG-2105, YANG-2106, YANG-2107, YANG-2108, YANG-2108a, YANG-2108b, YANG-2108c, YANG-2108d, YANG-2108e, YANG-2108f, YANG-2108g, YANG-2108h, YANG-2108i, YANG-2108j, YANG-2108k, YANG-21081, YANG-2109, YANG-2110, or YANG-2111, YANG-2111a, YANG-2111b, respectively.

[0308] In one embodiment, the antibody comprises a variable heavy (VH) domain sequence and a variable light (VL) domain sequence and wherein the variable heavy (VH) domain and variable light (VL) domain sequences respectively comprise a sequence having at least 90% identity to the variable heavy (VH) and variable light (VL) domain sequences of antibody YANG-1112, YANG-2107, YANG-2108, or YANG-2111, provided that the antibody has the CDRs of antibody YANG-1112, YANG-2107, YANG-2108, or YANG-2111, respectively.

[0309] In one embodiment, the variable heavy (VH) domain sequence comprises a sequence having at least 90% identity to the VH domain sequence of antibody YANG-1101 and the variable light (VL) domain sequence comprises a sequence having at least 90% identity to the VL domain sequence of antibody YANG-1101, provided that the antibody has the CDRs of antibody YANG-1101.

[0310] In one embodiment, the variable heavy (VH) domain sequence comprises a sequence having at least 90% identity to the VH domain sequence of antibody YANG-1103 and the variable light (VL) domain sequence comprises a sequence having at least 90% identity to the VL domain sequence of antibody YANG-1103, provided that the antibody has the CDRs of antibody YANG-1103.

[0311] In one embodiment, the variable heavy (VH) domain sequence comprises a sequence having at least 90% identity to the VH domain sequence of antibody YANG-1105 and the variable light (VL) domain sequence comprises a sequence having at least 90% identity to the VL domain sequence of antibody YANG-1105, provided that the antibody has the CDRs of antibody YANG-1105.

[0312] In one embodiment, the variable heavy (VH) domain sequence comprises a sequence having at least 90% identity to the VH domain sequence of antibody YANG-1106 and the variable light (VL) domain sequence comprises a sequence having at least 90% identity to the VL domain sequence of antibody YANG-1106, provided that the antibody has the CDRs of antibody YANG-1106.

[0313] In one embodiment, the variable heavy (VH) domain sequence comprises a sequence having at least 90% identity to the VH domain sequence of antibody YANG-1107 and the variable light (VL) domain sequence comprises a sequence having at least 90% identity to the VL domain sequence of antibody YANG-1107, provided that the antibody has the CDRs of antibody YANG-1107.

[0314] In one embodiment, the variable heavy (VH) domain sequence comprises a sequence having at least 90% identity to the VH domain sequence of antibody YANG-1108 and the variable light (VL) domain sequence comprises a sequence having at least 90% identity to the VL domain sequence of antibody YANG-1108, provided that the antibody has the CDRs of antibody YANG-1108.

[0315] In one embodiment, the variable heavy (VH) domain sequence comprises a sequence having at least 90% identity to the VH domain sequence of antibody YANG-1109 and the variable light (VL) domain sequence comprises a sequence having at least 90% identity to the VL domain sequence of antibody YANG-1109, provided that the antibody has the CDRs of antibody YANG-1109.

[0316] In one embodiment, the variable heavy (VH) domain sequence comprises a sequence having at least 90% identity to the VH domain sequence of antibody YANG-1110 and the variable light (VL) domain sequence comprises a sequence having at least 90% identity to the VL domain sequence of antibody YANG-1110, provided that the antibody has the CDRs of antibody YANG-1110.

[0317] In one embodiment, the variable heavy (VH) domain sequence comprises a sequence having at least 90% identity to the VH domain sequence of antibody YANG-1112 and the variable light (VL) domain sequence comprises a sequence having at least 90% identity to the VL domain sequence of antibody YANG-1112, provided that the antibody has the CDRs of antibody YANG-1112.

[0318] In one embodiment, the variable heavy (VH) domain sequence comprises a sequence having at least 90% identity to the VH domain sequence of antibody YANG-1113 and the variable light (VL) domain sequence comprises a sequence having at least 90% identity to the VL domain sequence of antibody YANG-1113, provided that the antibody has the CDRs of antibody YANG-1113.

[0319] In one embodiment, the variable heavy (VH) domain sequence comprises a sequence having at least 90% identity to the VH domain sequence of antibody YANG-1114 and the variable light (VL) domain sequence comprises a sequence having at least 90% identity to the VL domain sequence of antibody YANG-1114, provided that the antibody has the CDRs of antibody YANG-1114.

[0320] In one embodiment, the variable heavy (VH) domain sequence comprises a sequence having at least 90% identity to the VH domain sequence of antibody YANG-1115 and the variable light (VL) domain sequence comprises a sequence having at least 90% identity to the VL domain sequence of antibody YANG-1115, provided that the antibody has the CDRs of antibody YANG-1115.

[0321] In one embodiment, the variable heavy (VH) domain sequence comprises a sequence having at least 90% identity to the VH domain sequence of antibody YANG-1116 and the variable light (VL) domain sequence comprises a sequence having at least 90% identity to the VL domain sequence of antibody YANG-1116, provided that the antibody has the CDRs of antibody YANG-1116.

[0322] In one embodiment, the variable heavy (VH) domain sequence comprises a sequence having at least 90% identity to the VH domain sequence of antibody YANG-1117 and the variable light (VL) domain sequence comprises a sequence having at least 90% identity to the VL domain sequence of antibody YANG-1117, provided that the antibody has the CDRs of antibody YANG-1117.

[0323] In one embodiment, the variable heavy (VH) domain sequence comprises a sequence having at least 90% identity to the VH domain sequence of antibody YANG-1118 and the variable light (VL) domain sequence comprises a sequence having at least 90% identity to the VL domain sequence of antibody YANG-1118, provided that the antibody has the CDRs of antibody YANG-1118.

[0324] In one embodiment, the variable heavy (VH) domain sequence comprises a sequence having at least 90% identity to the VH domain sequence of antibody YANG-1119 and the variable light (VL) domain sequence comprises a sequence having at least 90% identity to the VL domain sequence of antibody YANG-1119, provided that the antibody has the CDRs of antibody YANG-1119.

[0325] In one embodiment, the variable heavy (VH) domain sequence comprises a sequence having at least 90% identity to the VH domain sequence of antibody YANG-2101 and the variable light (VL) domain sequence comprises a sequence having at least 90% identity to the VL domain sequence of antibody YANG-2101, provided that the antibody has the CDRs of antibody YANG-2101.

[0326] In one embodiment, the variable heavy (VH) domain sequence comprises a sequence having at least 90% identity to the VH domain sequence of antibody YANG-2102 and the variable light (VL) domain sequence comprises a sequence having at least 90% identity to the VL domain sequence of antibody YANG-2102, provided that the antibody has the CDRs of antibody YANG-2102.

[0327] In one embodiment, the variable heavy (VH) domain sequence comprises a sequence having at least 90% identity to the VH domain sequence of antibody YANG-2103 and the variable light (VL) domain sequence comprises a sequence having at least 90% identity to the VL domain sequence of antibody YANG-2103, provided that the antibody has the CDRs of antibody YANG-2103.

[0328] In one embodiment, the variable heavy (VH) domain sequence comprises a sequence having at least 90% identity to the VH domain sequence of antibody YANG-2104 and the variable light (VL) domain sequence comprises a sequence having at least 90% identity to the VL domain sequence of antibody YANG-2104, provided that the antibody has the CDRs of antibody YANG-2104.

[0329] In one embodiment, the variable heavy (VH) domain sequence comprises a sequence having at least 90% identity to the VH domain sequence of antibody YANG-2105 and the variable light (VL) domain sequence comprises a sequence having at least 90% identity to the VL domain sequence of antibody YANG-2105, provided that the antibody has the CDRs of antibody YANG-2105.

[0330] In one embodiment, the variable heavy (VH) domain sequence comprises a sequence having at least 90% identity to the VH domain sequence of antibody YANG-2106 and the variable light (VL) domain sequence comprises a sequence having at least 90% identity to the VL domain sequence of antibody YANG-2106, provided that the antibody has the CDRs of antibody YANG-2106.

[0331] In one embodiment, the variable heavy (VH) domain sequence comprises a sequence having at least 90% identity to the VH domain sequence of antibody YANG-2107 and the variable light (VL) domain sequence comprises a sequence having at least 90% identity to the VL domain sequence of antibody YANG-2107, provided that the antibody has the CDRs of antibody YANG-2107.

[0332] In one embodiment, the variable heavy (VH) domain sequence comprises a sequence having at least 90% identity to the VH domain sequence of antibody YANG-2108 and the variable light (VL) domain sequence comprises a sequence having at least 90% identity to the VL domain sequence of antibody YANG-2108, provided that the antibody has the CDRs of antibody YANG-2108.

[0333] In one embodiment, the variable heavy (VH) domain sequence comprises a sequence having at least 90% identity to the VH domain sequence of antibody YANG-2109 and the variable light (VL) domain sequence comprises a sequence having at least 90% identity to the VL domain sequence of antibody YANG-2109, provided that the antibody has the CDRs of antibody YANG-2109.

[0334] In one embodiment, the variable heavy (VH) domain sequence comprises a sequence having at least 90% identity to the VH domain sequence of antibody YANG-2110 and the variable light (VL) domain sequence comprises a sequence having at least 90% identity to the VL domain sequence of antibody YANG-2110, provided that the antibody has the CDRs of antibody YANG-2110.

[0335] In one embodiment, the variable heavy (VH) domain sequence comprises a sequence having at least 90% identity to the VH domain sequence of antibody YANG-2111 and the variable light (VL) domain sequence comprises a sequence having at least 90% identity to the VL domain sequence of antibody YANG-2111, provided that the antibody has the CDRs of antibody YANG-2111.

[0336] In one embodiment, the antibody specifically binds to the RBD of the SARS-CoV-2 spike protein and competes for binding to the SARS-CoV-2 spike protein with the human ACE2 receptor, and the antibody comprises a variable heavy (VH) domain sequence and a variable light (VL) domain sequence and wherein the variable heavy (VH) domain and variable light (VL) domain sequences respectively comprise a sequence having at least 90% identity to the variable heavy (VH) and variable light (VL) domain sequences of antibody YANG-1101, YANG-1103, YANG-1105, YANG-1106, YANG-1107, YANG-1108, YANG-1109, YANG-1110, YANG-1112, YANG-1112a, YANG-1112b, YANG-1112c, YANG-1113, YANG-1114, YANG-1115, YANG-1116, YANG-1117, YANG-1118, YANG-1119, YANG-2101, YANG-2102, YANG-2103, YANG-2104, YANG-2105, YANG-2106, YANG-2107, YANG-2108, YANG-2108a, YANG-2108b, YANG-2108c, YANG-2108d, YANG-2108e, YANG-2108f, YANG-2108g, YANG-2108h, YANG-2108i, YANG-2108j, YANG-2108k, YANG-21081, YANG-2109, YANG-2110, or YANG-2111 provided that the antibody has the CDRs of antibody YANG-1101, YANG-1103, YANG-1105, YANG-1106, YANG-1107, YANG-1108, YANG-1109, YANG-1110, YANG-1112, YANG-1112a, YANG-1112b, YANG-1112c, YANG-1113, YANG-1114, YANG-1115, YANG-1116, YANG-1117, YANG-1118, YANG-1119, YANG-2101, YANG-2102, YANG-2103, YANG-2104, YANG-2105, YANG-2106, YANG-2107, YANG-2108, YANG-2108a, YANG-2108b, YANG-2108c, YANG-2108d, YANG-2108e, YANG-2108f, YANG-2108g, YANG-2108h, YANG-2108i, YANG-2108j, YANG-2108k, YANG-21081, YANG-2109, YANG-2110, orYANG-2111, YANG-2111a, YANG-2111b, respectively.

[0337] In one embodiment, the antibody specifically binds to the RBD of the SARS-CoV-2 spike protein with a KD of 0.1 nM or lower (e.g. as measured by surface plasmon resonance (SPR)) and competes for binding to the SARS-CoV-2 spike protein with the human ACE2 receptor, and the antibody comprises a variable heavy (VH) domain sequence and a variable light (VL) domain sequence and wherein the variable heavy (VH) domain and variable light (VL) domain sequences respectively comprise a sequence having at least 90% identity to the variable heavy (VH) and variable light (VL) domain sequences of antibody YANG-1101, YANG-1103, YANG-1105, YANG-1106, YANG-1107, YANG-1108, YANG-1109, YANG-1110, YANG-1112, YANG-1112a, YANG-1112b, YANG-1112c, YANG-1113, YANG-1114, YANG-1115, YANG-1116, YANG-1117, YANG-1118, YANG-1119, YANG-2101, YANG-2102, YANG-2103, YANG-2104, YANG-2105, YANG-2106, YANG-2107, YANG-2108, YANG-2108a, YANG-2108b, YANG-2108c, YANG-2108d, YANG-2108e, YANG-2108f, YANG-2108g, YANG-2108h, YANG-2108i, YANG-2108j, YANG-2108k, YANG-21081, YANG-2109, YANG-2110, or YANG-2111 provided that the antibody has the CDRs of antibody YANG-1101, YANG-1103, YANG-1105, YANG-1106, YANG-1107, YANG-1108, YANG-1109, YANG-1110, YANG-1112, YANG-1112a, YANG-1112b, YANG-1112c, YANG-1113, YANG-1114, YANG-1115, YANG-1116, YANG-1117, YANG-1118, YANG-1119, YANG-2101, YANG-2102, YANG-2103, YANG-2104, YANG-2105, YANG-2106, YANG-2107, YANG-2108, YANG-2108a, YANG-2108b, YANG-2108c, YANG-2108d, YANG-2108e, YANG-2108f, YANG-2108g, YANG-2108h, YANG-2108i, YANG-2108j, YANG-2108k, YANG-21081, YANG-2109, YANG-2110, or YANG-2111, YANG-2111a, YANG-2111b, respectively.

[0338] In one embodiment, the antibody specifically binds to the RBD of the SARS-CoV-2 spike protein and competes for binding to the SARS-CoV-2 spike protein with the human ACE2 receptor, and the antibody comprises a variable heavy (VH) domain sequence and a variable light (VL) domain sequence and wherein the variable heavy (VH) domain and variable light (VL) domain sequences respectively comprise a sequence having at least 90% identity to the variable heavy (VH) and variable light (VL) domain sequences of antibody YANG-1112, YANG-2107, YANG-2108, or YANG-2111, provided that the antibody has the CDRs of antibody YANG-1112, YANG-2107, YANG-2108, or YANG-2111, respectively.

[0339] In one embodiment, the antibody specifically binds to the RBD of the SARS-CoV-2 spike protein with a KD of 0.1 nM or lower (e.g. as measured by surface plasmon resonance (SPR)) and competes for binding to the SARS-CoV-2 spike protein with the human ACE2 receptor, and the antibody comprises a variable heavy (VH) domain sequence and a variable light (VL) domain sequence and wherein the variable heavy (VH) domain and variable light (VL) domain sequences respectively comprise a sequence having at least 90% identity to the variable heavy (VH) and variable light (VL) domain sequences of antibody YANG-1112, YANG-2107, YANG-2108, or YANG-2111, provided that the antibody has the CDRs of antibody YANG-1112, YANG-2107, YANG-2108, or YANG-2111, respectively.

[0340] In one embodiment, the antibody specifically binds to the S2 subunit of the SARS-CoV-2 spike protein and competes for binding to the SARS-CoV-2 spike protein with the human ACE2 receptor and neutralises SARS-CoV-2 with at least 60% neutralisation (e.g. as measured in a pseudovirus neutralisation assay), and the antibody comprises a variable heavy (VH) domain sequence and a variable light (VL) domain sequence and wherein the variable heavy (VH) domain and variable light (VL) domain sequences respectively comprise a sequence having at least 90% identity to the variable heavy (VH) and variable light (VL) domain sequences of antibody YANG-1112, YANG-2107, YANG-2108, or YANG-2111, provided that the antibody has the CDRs of antibody YANG-1112, YANG-2107, YANG-2108, or YANG-2111, respectively.

[0341] In one embodiment, the antibody specifically binds to the S2 subunit of the SARS-CoV-2 spike protein with a KD of 0.1 nM or lower (e.g. as measured by surface plasmon resonance (SPR)) and competes for binding to the SARS-CoV-2 spike protein with the human ACE2 receptor and neutralises SARS-CoV-2 with at least 60% neutralisation (e.g. as measured in a pseudovirus neutralisation assay), and the antibody comprises a variable heavy (VH) domain sequence and a variable light (VL) domain sequence and wherein the variable heavy (VH) domain and variable light (VL) domain sequences respectively comprise a sequence having at least 90% identity to the variable heavy (VH) and variable light (VL) domain sequences of antibody YANG-1112, YANG-2107, YANG-2108, or YANG-2111, provided that the antibody has the CDRs of antibody YANG-1112, YANG-2107, YANG-2108, or YANG-2111, respectively.

[0342] In one embodiment, the present invention provides an antibody specifically binds to the RBD of the SARS-CoV-2 spike protein and competes for binding to the SARS-CoV-2 spike protein with the human ACE2 receptor, wherein the antibody comprises a variable heavy (VH) domain sequence and a variable light (VL) domain sequence and wherein the variable heavy (VH) domain and variable light (VL) domain sequences respectively comprise the variable heavy (VH) and variable light (VL) domain sequences of antibody YANG-1101, YANG-1103, YANG-1105, YANG-1106, YANG-1107, YANG-1108, YANG-1109, YANG-1110, YANG-1112, YANG-1112a, YANG-1112b, YANG-1112c, YANG-1113, YANG-1114, YANG-1115, YANG-1116, YANG-1117, YANG-1118, YANG-1119, YANG-2101, YANG-2102, YANG-2103, YANG-2104, YANG-2105, YANG-2106, YANG-2107, YANG-2108, YANG-2108a, YANG-2108b, YANG-2108c, YANG-2108d, YANG-2108e, YANG-2108f, YANG-2108g, YANG-2108h, YANG-2108i, YANG-2108j, YANG-2108k, YANG-21081, YANG-2109, YANG-2110, or YANG-2111.

[0343] In one embodiment, the present invention provides an antibody specifically binds to the RBD of the SARS-CoV-2 spike protein and competes for binding to the SARS-CoV-2 spike protein with the human ACE2 receptor, wherein the antibody comprises a variable heavy (VH) domain sequence and a variable light (VL) domain sequence and wherein the variable heavy (VH) domain and variable light (VL) domain sequences respectively comprise the variable heavy (VH) and variable light (VL) domain sequences of antibody YANG-1112, YANG-2107, YANG-2108, or YANG-2111.

[0344] An antibody that specifically binds to the receptor binding domain (RBD) of the SARS-CoV-2 spike protein, wherein the antibody comprises the VH and VL domain sequences of antibody YANG-1101.

[0345] An antibody that specifically binds to the receptor binding domain (RBD) of the SARS-CoV-2 spike protein, wherein the antibody comprises the VH and VL domain sequences of antibody YANG-1103.

[0346] An antibody that specifically binds to the receptor binding domain (RBD) of the SARS-CoV-2 spike protein, wherein the antibody comprises the VH and VL domain sequences of antibody YANG-1105.

[0347] An antibody that specifically binds to the receptor binding domain (RBD) of the SARS-CoV-2 spike protein, wherein the antibody comprises the VH and VL domain sequences of antibody YANG-1106.

[0348] An antibody that specifically binds to the receptor binding domain (RBD) of the SARS-CoV-2 spike protein, wherein the antibody comprises the VH and VL domain sequences of antibody YANG-1107.

[0349] An antibody that specifically binds to the receptor binding domain (RBD) of the SARS-CoV-2 spike protein, wherein the antibody comprises the VH and VL domain sequences of antibody YANG-1108.

[0350] An antibody that specifically binds to the receptor binding domain (RBD) of the SARS-CoV-2 spike protein, wherein the antibody comprises the VH and VL domain sequences of antibody YANG-1109.

[0351] An antibody that specifically binds to the receptor binding domain (RBD) of the SARS-CoV-2 spike protein, wherein the antibody comprises the VH and VL domain sequences of antibody YANG-1110.

[0352] An antibody that specifically binds to the receptor binding domain (RBD) of the SARS-CoV-2 spike protein, wherein the antibody comprises the VH and VL domain sequences of antibody YANG-1112.

[0353] An antibody that specifically binds to the receptor binding domain (RBD) of the SARS-CoV-2 spike protein, wherein the antibody comprises the VH and VL domain sequences of antibody YANG-1113.

[0354] An antibody that specifically binds to the receptor binding domain (RBD) of the SARS-CoV-2 spike protein, wherein the antibody comprises the VH and VL domain sequences of antibody YANG-1114.

[0355] An antibody that specifically binds to the receptor binding domain (RBD) of the SARS-CoV-2 spike protein, wherein the antibody comprises the VH and VL domain sequences of antibody YANG-1115.

[0356] An antibody that specifically binds to the receptor binding domain (RBD) of the SARS-CoV-2 spike protein, wherein the antibody comprises the VH and VL domain sequences of antibody YANG-1116.

[0357] An antibody that specifically binds to the receptor binding domain (RBD) of the SARS-CoV-2 spike protein, wherein the antibody comprises the VH and VL domain sequences of antibody YANG-1117.

[0358] An antibody that specifically binds to the receptor binding domain (RBD) of the SARS-CoV-2 spike protein, wherein the antibody comprises the VH and VL domain sequences of antibody YANG-1118.

[0359] An antibody that specifically binds to the receptor binding domain (RBD) of the SARS-CoV-2 spike protein, wherein the antibody comprises the VH and VL domain sequences of antibody YANG-1119.

[0360] An antibody that specifically binds to the receptor binding domain (RBD) of the SARS-CoV-2 spike protein, wherein the antibody comprises the VH and VL domain sequences of antibody YANG-2101.

[0361] An antibody that specifically binds to the receptor binding domain (RBD) of the SARS-CoV-2 spike protein, wherein the antibody comprises the VH and VL domain sequences of antibody YANG-2102.

[0362] An antibody that specifically binds to the receptor binding domain (RBD) of the SARS-CoV-2 spike protein, wherein the antibody comprises the VH and VL domain sequences of antibody YANG-2103.

[0363] An antibody that specifically binds to the receptor binding domain (RBD) of the SARS-CoV-2 spike protein, wherein the antibody comprises the VH and VL domain sequences of antibody YANG-2104.

[0364] An antibody that specifically binds to the receptor binding domain (RBD) of the SARS-CoV-2 spike protein, wherein the antibody comprises the VH and VL domain sequences of antibody YANG-2105.

[0365] An antibody that specifically binds to the receptor binding domain (RBD) of the SARS-CoV-2 spike protein, wherein the antibody comprises the VH and VL domain sequences of antibody YANG-2106.

[0366] An antibody that specifically binds to the receptor binding domain (RBD) of the SARS-CoV-2 spike protein, wherein the antibody comprises the VH and VL domain sequences of antibody YANG-2107.

[0367] An antibody that specifically binds to the receptor binding domain (RBD) of the SARS-CoV-2 spike protein, wherein the antibody comprises the VH and VL domain sequences of antibody YANG-2108.

[0368] An antibody that specifically binds to the receptor binding domain (RBD) of the SARS-CoV-2 spike protein, wherein the antibody comprises the VH and VL domain sequences of antibody YANG-2109.

[0369] An antibody that specifically binds to the receptor binding domain (RBD) of the SARS-CoV-2 spike protein, wherein the antibody comprises the VH and VL domain sequences of antibody YANG-2110.

[0370] An antibody that specifically binds to the receptor binding domain (RBD) of the SARS-CoV-2 spike protein, wherein the antibody comprises the VH and VL domain sequences of antibody YANG-2111.

[0371] In one embodiment, the antibody comprises a variable heavy (VH) domain sequence and a variable light (VL) domain sequence and wherein the variable heavy (VH) domain and variable light (VL) domain sequences respectively comprise the variable heavy (VH) and variable light (VL) domain sequences of antibody YANG-1101, YANG-1103, YANG-1105, YANG-1106, YANG-1107, YANG-1108, YANG-1109, YANG-1110, YANG-1112, YANG-1112a, YANG-1112b, YANG-1112c, YANG-1113, YANG-1114, YANG-1115, YANG-1116, YANG-1117, YANG-1118, YANG-1119, YANG-2101, YANG-2102, YANG-2103, YANG-2104, YANG-2105, YANG-2106, YANG-2107, YANG-2108, YANG-2108a, YANG-2108b, YANG-2108c, YANG-2108d, YANG-2108e, YANG-2108f, YANG-2108g, YANG-2108h, YANG-2108i, YANG-2108j, YANG-2108k, YANG-21081, YANG-2109, YANG-2110, or YANG-2111.

[0372] In one embodiment, the antibody comprises a variable heavy (VH) domain sequence and a variable light (VL) domain sequence and wherein the variable heavy (VH) domain and variable light (VL) domain sequences respectively comprise the variable heavy (VH) and variable light (VL) domain sequences of antibody YANG-1112, YANG-2107, YANG-2108, or YANG-2111.

[0373] In one embodiment, the antibody comprises the VH and VL domain sequences of antibody YANG-1101.

[0374] In one embodiment, the antibody comprises the VH and VL domain sequences of antibody YANG-1103.

[0375] In one embodiment, the antibody comprises the VH and VL domain sequences of antibody YANG-1105.

[0376] In one embodiment, the antibody comprises the VH and VL domain sequences of antibody YANG-1106.

[0377] In one embodiment, the antibody comprises the VH and VL domain sequences of antibody YANG-1107.

[0378] In one embodiment, the antibody comprises the VH and VL domain sequences of antibody YANG-1108.

[0379] In one embodiment, the antibody comprises the VH and VL domain sequences of antibody YANG-1109.

[0380] In one embodiment, the antibody comprises the VH and VL domain sequences of antibody YANG-1110.

[0381] In one embodiment, the antibody comprises the VH and VL domain sequences of antibody YANG-1112.

[0382] In one embodiment, the antibody comprises the VH and VL domain sequences of antibody YANG-1113.

[0383] In one embodiment, the antibody comprises the VH and VL domain sequences of antibody YANG-1114.

[0384] In one embodiment, the antibody comprises the VH and VL domain sequences of antibody YANG-1115.

[0385] In one embodiment, the antibody comprises the VH and VL domain sequences of antibody YANG-1116.

[0386] In one embodiment, the antibody comprises the VH and VL domain sequences of antibody YANG-1117.

[0387] In one embodiment, the antibody comprises the VH and VL domain sequences of antibody YANG-1118.

[0388] In one embodiment, the antibody comprises the VH and VL domain sequences of antibody YANG-1119.

[0389] In one embodiment, the antibody comprises the VH and VL domain sequences of antibody YANG-2101.

[0390] In one embodiment, the antibody comprises the VH and VL domain sequences of antibody YANG-2102.

[0391] In one embodiment, the antibody comprises the VH and VL domain sequences of antibody YANG-2103.

[0392] In one embodiment, the antibody comprises the VH and VL domain sequences of antibody YANG-2104.

[0393] In one embodiment, the antibody comprises the VH and VL domain sequences of antibody YANG-2105.

[0394] In one embodiment, the antibody comprises the VH and VL domain sequences of antibody YANG-2106.

[0395] In one embodiment, the antibody comprises the VH and VL domain sequences of antibody YANG-2107.

[0396] In one embodiment, the antibody comprises the VH and VL domain sequences of antibody YANG-2108.

[0397] In one embodiment, the antibody comprises the VH and VL domain sequences of antibody YANG-2109.

[0398] In one embodiment, the antibody comprises the VH and VL domain sequences of antibody YANG-2110.

[0399] In one embodiment, the antibody comprises the VH and VL domain sequences of antibody YANG-2111.

[0400] Antibodies are provided which bind to the same epitope on the RBD of the SARS-CoV-2 spike protein as an antibody described anywhere herein.

[0401] An antibody is provided which bind to the same epitope as antibody YANG-1101, YANG-1103, YANG-1105, YANG-1106, YANG-1107, YANG-1108, YANG-1109, YANG-1110, YANG-1112, YANG-1112a, YANG-1112b, YANG-1112c, YANG-1113, YANG-1114, YANG-1115, YANG-1116, YANG-1117, YANG-1118, YANG-1119, YANG-2101, YANG-2102, YANG-2103, YANG-2104, YANG-2105, YANG-2106, YANG-2107, YANG-2108, YANG-2108a, YANG-2108b, YANG-2108c, YANG-2108d, YANG-2108e, YANG-2108f, YANG-2108g, YANG-2108h, YANG-2108i, YANG-2108j, YANG-2108k, YANG-21081, YANG-2109, YANG-2110, orYANG-2111, YANG-2111a, YANG-2111b, e.g. as defined by its VH and VL sequences.

[0402] An antibody is provided which bind to the same epitope as antibody YANG-1112, YANG-2107, YANG-2108, or YANG-2111, e.g. as defined by its VH and VL sequences.

[0403] In one embodiment, an antibody is provided which binds to the same epitope as antibody YANG-1101.

[0404] In one embodiment, an antibody is provided which binds to the same epitope as antibody YANG-1103.

[0405] In one embodiment, an antibody is provided which binds to the same epitope as antibody YANG-1105.

[0406] In one embodiment, an antibody is provided which binds to the same epitope as antibody YANG-1106.

[0407] In one embodiment, an antibody is provided which binds to the same epitope as antibody YANG-1107.

[0408] In one embodiment, an antibody is provided which binds to the same epitope as antibody YANG-1108.

[0409] In one embodiment, an antibody is provided which binds to the same epitope as antibody YANG-1109.

[0410] In one embodiment, an antibody is provided which binds to the same epitope as antibody YANG-1110.

[0411] In one embodiment, an antibody is provided which binds to the same epitope as antibody YANG-1112.

[0412] In one embodiment, an antibody is provided which binds to the same epitope as antibody YANG-1113.

[0413] In one embodiment, an antibody is provided which binds to the same epitope as antibody YANG-1114.

[0414] In one embodiment, an antibody is provided which binds to the same epitope as antibody YANG-1115.

[0415] In one embodiment, an antibody is provided which binds to the same epitope as antibody YANG-1116.

[0416] In one embodiment, an antibody is provided which binds to the same epitope as antibody YANG-1117.

[0417] In one embodiment, an antibody is provided which binds to the same epitope as antibody YANG-1118.

[0418] In one embodiment, an antibody is provided which binds to the same epitope as antibody YANG-1119.

[0419] In one embodiment, an antibody is provided which binds to the same epitope as antibody YANG-2101.

[0420] In one embodiment, an antibody is provided which binds to the same epitope as antibody YANG-2102.

[0421] In one embodiment, an antibody is provided which binds to the same epitope as antibody YANG-2103.

[0422] In one embodiment, an antibody is provided which binds to the same epitope as antibody YANG-2104.

[0423] In one embodiment, an antibody is provided which binds to the same epitope as antibody YANG-2105.

[0424] In one embodiment, an antibody is provided which binds to the same epitope as antibody YANG-2106.

[0425] In one embodiment, an antibody is provided which binds to the same epitope as antibody YANG-2107.

[0426] In one embodiment, an antibody is provided which binds to the same epitope as antibody YANG-2108.

[0427] In one embodiment, an antibody is provided which binds to the same epitope as antibody YANG-2109.

[0428] In one embodiment, an antibody is provided which binds to the same epitope as antibody YANG-2110.

[0429] In one embodiment, an antibody is provided which binds to the same epitope as antibody YANG-2111.

[0430] An antibody may contact the SARS-CoV-2 spike protein with a footprint that fully or partly overlaps with that of an antibody disclosed anywhere herein. As described elsewhere herein, competition between antibodies may be determined, for example using SPR, and antibodies are provided which compete for binding to the spike protein (compete for binding to their epitope) with an IgG antibody as described anywhere herein.

[0431] An antibody of the present invention may be one which competes for binding to SARS-CoV-2 spike protein with any anti-RBD antibody described herein, such as YANG-1101, YANG-1103, YANG-1105, YANG-1106, YANG-1107, YANG-1108, YANG-1109, YANG-1110, YANG-1112, YANG-1112a, YANG-1112b, YANG-1112c, YANG-1113, YANG-1114, YANG-1115, YANG-1116, YANG-1117, YANG-1118, YANG-1119, YANG-2101, YANG-2102, YANG-2103, YANG-2104, YANG-2105, YANG-2106, YANG-2107, YANG-2108, YANG-2108a, YANG-2108b, YANG-2108c, YANG-2108d, YANG-2108e, YANG-2108f, YANG-2108g, YANG-2108h, YANG-2108i, YANG-2108j, YANG-2108k, YANG-21081, YANG-2109, YANG-2110, orYANG-2111, YANG-2111a, YANG-2111b, e.g. as defined by its VH and VL sequences.

[0432] An antibody of the present invention may be one which competes for binding to the SARS-CoV-2 spike protein with antibody YANG-1101.

[0433] An antibody of the present invention may be one which competes for binding to the SARS-CoV-2 spike protein with antibody YANG-1103.

[0434] An antibody of the present invention may be one which competes for binding to the SARS-CoV-2 spike protein with antibody YANG-1105.

[0435] An antibody of the present invention may be one which competes for binding to the SARS-CoV-2 spike protein with antibody YANG-1106.

[0436] An antibody of the present invention may be one which competes for binding to the SARS-CoV-2 spike protein with antibody YANG-1107.

[0437] An antibody of the present invention may be one which competes for binding to the SARS-CoV-2 spike protein with antibody YANG-1108.

[0438] An antibody of the present invention may be one which competes for binding to the SARS-CoV-2 spike protein with antibody YANG-1109.

[0439] An antibody of the present invention may be one which competes for binding to the SARS-CoV-2 spike protein with antibody YANG-1110.

[0440] An antibody of the present invention may be one which competes for binding to the SARS-CoV-2 spike protein with antibody YANG-1112.

[0441] An antibody of the present invention may be one which competes for binding to the SARS-CoV-2 spike protein with antibody YANG-1113.

[0442] An antibody of the present invention may be one which competes for binding to the SARS-CoV-2 spike protein with antibody YANG-1114.

[0443] An antibody of the present invention may be one which competes for binding to the SARS-CoV-2 spike protein with antibody YANG-1115.

[0444] An antibody of the present invention may be one which competes for binding to the SARS-CoV-2 spike protein with antibody YANG-1116.

[0445] An antibody of the present invention may be one which competes for binding to the SARS-CoV-2 spike protein with antibody YANG-1117.

[0446] An antibody of the present invention may be one which competes for binding to the SARS-CoV-2 spike protein with antibody YANG-1118.

[0447] An antibody of the present invention may be one which competes for binding to the SARS-CoV-2 spike protein with antibody YANG-1119.

[0448] An antibody of the present invention may be one which competes for binding to the SARS-CoV-2 spike protein with antibody YANG-2101.

[0449] An antibody of the present invention may be one which competes for binding to the SARS-CoV-2 spike protein with antibody YANG-2102.

[0450] An antibody of the present invention may be one which competes for binding to the SARS-CoV-2 spike protein with antibody YANG-2103.

[0451] An antibody of the present invention may be one which competes for binding to the SARS-CoV-2 spike protein with antibody YANG-2104.

[0452] An antibody of the present invention may be one which competes for binding to the SARS-CoV-2 spike protein with antibody YANG-2105.

[0453] An antibody of the present invention may be one which competes for binding to the SARS-CoV-2 spike protein with antibody YANG-2106.

[0454] An antibody of the present invention may be one which competes for binding to the SARS-CoV-2 spike protein with antibody YANG-2107.

[0455] An antibody of the present invention may be one which competes for binding to the SARS-CoV-2 spike protein with antibody YANG-2108.

[0456] An antibody of the present invention may be one which competes for binding to the SARS-CoV-2 spike protein with antibody YANG-2109.

[0457] An antibody of the present invention may be one which competes for binding to the SARS-CoV-2 spike protein with antibody YANG-2110.

[0458] An antibody of the present invention may be one which competes for binding to the SARS-CoV-2 spike protein with antibody YANG-2111.

[0459] In one embodiment, the antibody comprises VH and/or VL domain framework regions of human germline gene segment sequences.

[0460] In one embodiment, the antibody comprises an antibody VH domain which
[0461] i) is derived from recombination of a human heavy chain V gene segment, a human heavy chain D gene segment and a human heavy chain J gene segment, wherein
   [0462] the V gene segment is IGHV4-39*01, IGHV3-53*01, IGHV3-30*18, IGHV2-5*10, IGHV3-21*03, IGHV3-13*01, IGHV3-33*01, IGHV4-4*02, IGHV1-69*05 or IGHV3-9*01; and/or the J gene segment is IGHJ3*02, IGHJ4*02 or IGHJ6*02; or
[0463] ii) comprises framework regions FR1, FR2, FR3 and FR4, wherein
   [0464] FR1 aligns with human germline V gene segment IGHV4-39*01, IGHV3-53*01, IGHV3-30*18,
[0465] IGHV2-5*10, IGHV3-21*03, IGHV3-13*01, IGHV3-33*01, IGHV4-4*02, IGHV1-69*05 orIGHV3-9*01 with up to 1, 2, 3, 4, or 5 amino acid alterations,
   [0466] FR2 aligns with human germline V gene segment IGHV4-39*01, IGHV3-53*01, IGHV3-30*18, IGHV2-5*10, IGHV3-21*03, IGHV3-13*01, IGHV3-33*01, IGHV4-4*02, IGHV1-69*05 orIGHV3-9*01 with up to 1, 2, 3, 4, or 5 amino acid alterations,
   [0467] FR3 aligns with human germline V gene segment IGHV4-39*01, IGHV3-53*01, IGHV3-30*18, IGHV2-5*10, IGHV3-21*03, IGHV3-13*01, IGHV3-33*01, IGHV4-4*02, IGHV1-69*05 orIGHV3-9*01 with up to 1, 2, 3, 4, or 5 amino acid alterations, and/or
   [0468] FR4 aligns with human germline J gene segment IGHJ3*02, IGHJ4*02 or IGHJ6*02 with up to 1, 2, 3, 4 or 5 amino acid alterations.

[0469] In one embodiment, the antibody comprises an antibody VH domain which
[0470] i) is derived from recombination of a human heavy chain V gene segment IGHV4-39*01, IGHV3-53*01, IGHV3-30*18, IGHV2-5*10, IGHV3-21*03, IGHV3-13*01, IGHV3-33*01, IGHV4-4*02, IGHV1-69*05 or IGHV3-9*01, a human heavy chain D gene segment and a human heavy chain J gene segment, or
[0471] ii) comprises framework regions FR1, FR2, FR3 and FR4, wherein FR1, FR2 and FR3 each align with human germline V segment IGHV4-39*01, IGHV3-53*01, IGHV3-30*18, IGHV2-5*10, IGHV3-21*03, IGHV3-13*01, IGHV3-33*01, IGHV4-4*02, IGHV1-69*05 or IGHV3-9*01 with up to 1, 2, 3, 4 or 5 amino acid alterations.

[0472] In one embodiment, the J gene segment is IGHJ3*02, IGHJ4*02 or IGHJ6*02, or the VH domain framework region FR4 aligns with human germline J gene segment IGHJ3*02, IGHJ4*02 or IGHJ6*02 with 1, 2, 3, 4 or 5 amino acid alterations.

[0473] In one embodiment, the antibody comprises an antibody VL domain which
[0474] i) is derived from recombination of a human light chain V gene segment and a human light chain J gene segment, wherein
   [0475] the V gene segment is IGLV2-23*d02, IGKV1-9*d01, IGKV3-15*01, IGKV1D-13*d01, IGLV4-60*d03, IGLV3-10*01, IGLV2-14*01, IGKV1-16*02, IGLV3-21*d01, IGKV1D-17*01, IGKV1-17*01, IGKV3D-7*01 or IGKV2-28*01; and/or the J gene segment is IGLJ2*01, IGKJ5*01, IGKJ2*04, IGKJ1*01, IGKJ4*01 or IGLJ3*02; or
[0476] ii) comprises framework regions FR1, FR2, FR3 and FR4, wherein
   [0477] FR1 aligns with human germline V gene segment IGLV2-23*d02, IGKV1-9*d01, IGKV3-15*01, IGKV1D-13*d01, IGLV4-60*d03, IGLV3-10*01, IGLV2-14*01, IGKV1-16*02, IGLV3-21*d01, IGKV1D-17*01, IGKV1-17*01, IGKV3D-7*01 or IGKV2-28*01 with up to 1, 2, 3, 4, or 5 amino acid alterations,
   [0478] FR2 aligns with human germline V gene segment IGLV2-23*d02, IGKV1-9*d01, IGKV3-15*01, IGKV1D-13*d01, IGLV4-60*d03, IGLV3-10*01, IGLV2-14*01, IGKV1-16*02, IGLV3-21*d01, IGKV1D-17*01, IGKV1-17*01, IGKV3D-7*01 or IGKV2-28*01 with up to 1, 2, 3, 4, or 5 amino acid alterations
   [0479] FR3 aligns with human germline V gene segment IGLV2-23*d02, IGKV1-9*d01, IGKV3-15*01, IGKV1D-13*d01, IGLV4-60*d03, IGLV3-10*01, IGLV2-14*01, IGKV1-16*02, IGLV3-21*d01, IGKV1D-17*01, IGKV1-17*01, IGKV3D-7*01 or IGKV2-28*01 with up to 1, 2, 3, 4 or 5 amino acid alterations, and/or
   [0480] FR4 aligns with human germline J gene segment IGLJ2*01, IGKJ5*01, IGKJ2*04, IGKJ1*01, IGKJ4*01 or IGLJ3*02 with up to 1, 2, 3, 4 or 5 amino acid alterations.

[0481] In one embodiment, the antibody comprises an antibody VL domain derived from recombination of a human light chain V gene segment and a human light chain J gene segment, wherein:
[0482] the V gene segment is IGLV2-23*d02, IGKV1-9*d01, IGKV3-15*01, IGKV1D-13*d01, IGLV4-60*d03, IGLV3-10*01, IGLV2-14*01, IGKV1-16*02, IGLV3-21*d01, IGKV1D-17*01, IGKV1-17*01, IGKV3D-7*01 or IGKV2-28*01, and optionally
[0483] the J gene segment is IGLJ2*01, IGKJ5*01, IGKJ2*04, IGKJ1*01, IGKJ4*01 or IGLJ3*02.

[0484] Example combinations of v and j gene segments for heavy and light chain variable domains are shown in Table 3, and these represent preferred combinations. The heavy and light chain variable domains may optionally be derived from the v and j gene segments identified in Table 3 for any one individual YANG antibody.

### Group B—Trimer Binders:

[0485] In a second aspect, the present invention provides an antibody that preferentially binds to the trimer form of the SARS-CoV-2 spike protein over the isolated RBD domain, isolated S1 subunit or isolated S2 subunit of the SARS-CoV-2 spike protein.

[0486] In one embodiment, the antibody specifically binds to the trimer form of the SARS-CoV-2 spike protein and does not bind to the isolated RBD domain.

[0487] In one embodiment, the antibody specifically binds to the trimer form of the SARS-CoV-2 spike protein and does not bind to the isolated RBD domain, isolated S1 subunit or isolated S2 subunit of the SARS-CoV-2 spike protein.

[0488] In one embodiment, the antibody is a neutralising antibody.

[0489] In one embodiment, the antibody neutralises SARS-CoV-2 with an IC50 of 75 nM or lower, preferably 15 nM or lower (e.g. as measured in a pseudovirus neutralisation assay).

[0490] In one embodiment, the antibody comprises a variable heavy (VH) domain sequence comprising complementarity determining regions (CDRs) HCDR1, HCDR2 and HCDR3, and a variable light (VL) domain sequence comprising complementarity determining regions LCDR1, LCDR2 and LCDR3, wherein the HCDR3 is the HCDR3 of antibody IMPI-030, IMPI-053, IMPI-025, IMPI-040, IMPI-007, IMPI-020, IMPI-032, IMPI-023, IMPI-039, IMPI-001, IMPI-019, IMPI-010, IMPI-008, IMPI-031, IMPI-057, IMPI-022, IMPI-035, IMPI-067 or IMPI-072.

[0491] In one embodiment, the HCDR3 is the HCDR3 of antibody IMPI-030.

[0492] In one embodiment, the HCDR3 is the HCDR3 of antibody IMPI-053.

[0493] In one embodiment, the HCDR3 is the HCDR3 of antibody IMPI-025.

[0494] In one embodiment, the HCDR3 is the HCDR3 of antibody IMPI-040.

[0495] In one embodiment, the HCDR3 is the HCDR3 of antibody IMPI-007.

[0496] In one embodiment, the HCDR3 is the HCDR3 of antibody IMPI-020.

[0497] In one embodiment, the HCDR3 is the HCDR3 of antibody IMPI-032.

[0498] In one embodiment, the HCDR3 is the HCDR3 of antibody IMPI-023.

[0499] In one embodiment, the HCDR3 is the HCDR3 of antibody IMPI-039.

[0500] In one embodiment, the HCDR3 is the HCDR3 of antibody IMPI-001.

[0501] In one embodiment, the HCDR3 is the HCDR3 of antibody IMPI-019.

[0502] In one embodiment, the HCDR3 is the HCDR3 of antibody IMPI-010.

[0503] In one embodiment, the HCDR3 is the HCDR3 of antibody IMPI-008.

[0504] In one embodiment, the HCDR3 is the HCDR3 of antibody IMPI-031.

[0505] In one embodiment, the HCDR3 is the HCDR3 of antibody IMPI-057.

[0506] In one embodiment, the HCDR3 is the HCDR3 of antibody IMPI-022.

[0507] In one embodiment, the HCDR3 is the HCDR3 of antibody IMPI-035.

[0508] In one embodiment, the HCDR3 is the HCDR3 of antibody IMPI-067.

[0509] In one embodiment, the HCDR3 is the HCDR3 of antibody IMPI-072.

[0510] In one embodiment, the present invention provides anti-SARS-CoV2 antibody,

wherein the antibody comprises a variable heavy (VH) domain sequence comprising complementarity determining regions (CDRs) HCDR1, HCDR2, and HCDR3, and a variable light (VL) domain sequence comprising complementarity determining regions LCDR1, LCDR2 and LCDR3,
wherein the CDRs are those of antibody IMPI-030, IMPI-053, IMPI-025, IMPI-040, IMPI-007, IMPI-020, IMPI-032, IMPI-023, IMPI-039, IMPI-001, IMPI-019, IMPI-010, IMPI-008, IMPI-031, IMPI-057, IMPI-022, IMPI-035, IMPI-067 or IMPI-072.

[0511] In one embodiment, the antibody comprises a variable heavy (VH) domain sequence comprising complementarity determining regions (CDRs) HCDR1, HCDR2, and HCDR3, and a variable light (VL) domain sequence comprising complementarity determining regions LCDR1, LCDR2 and LCDR3, wherein the CDRs are those of antibody IMPI-030, IMPI-053, IMPI-025, IMPI-040, IMPI-007, IMPI-020, IMPI-032, IMPI-023, IMPI-039, IMPI-001, IMPI-019, IMPI-010, IMPI-008, IMPI-031, IMPI-057, IMPI-022, IMPI-035, IMPI-067 or IMPI-072.

[0512] In one embodiment, the antibody has the CDRs of antibody IMPI-030.

[0513] In one embodiment, the antibody has the CDRs of antibody IMPI-053.

[0514] In one embodiment, the antibody has the CDRs of antibody IMPI-025.

[0515] In one embodiment, the antibody has the CDRs of antibody IMPI-040.

[0516] In one embodiment, the antibody has the CDRs of antibody IMPI-007.

[0517] In one embodiment, the antibody has the CDRs of antibody IMPI-020.

[0518] In one embodiment, the antibody has the CDRs of antibody IMPI-032.

[0519] In one embodiment, the antibody has the CDRs of antibody IMPI-023.

[0520] In one embodiment, the antibody has the CDRs of antibody IMPI-039.

[0521] In one embodiment, the antibody has the CDRs of antibody IMPI-001.

[0522] In one embodiment, the antibody has the CDRs of antibody IMPI-019.

[0523] In one embodiment, the antibody has the CDRs of antibody IMPI-010.

[0524] In one embodiment, the antibody has the CDRs of antibody IMPI-008.

[0525] In one embodiment, the antibody has the CDRs of antibody IMPI-031.

[0526] In one embodiment, the antibody has the CDRs of antibody IMPI-057.

[0527] In one embodiment, the antibody has the CDRs of antibody IMPI-022.

[0528] In one embodiment, the antibody has the CDRs of antibody IMPI-035.

[0529] In one embodiment, the antibody has the CDRs of antibody IMPI-067.

[0530] In one embodiment, the antibody has the CDRs of antibody IMPI-072.

[0531] In one embodiment, the antibody comprises a variable heavy (VH) domain sequence and a variable light (VL) domain sequence and wherein the variable heavy (VH) domain and variable light (VL) domain sequences respectively comprise the variable heavy (VH) domain and variable light (VL) domain sequences of antibody IMPI-030, IMPI-053, IMPI-025, IMPI-040, IMPI-007, IMPI-020, IMPI-032, IMPI-023, IMPI-039, IMPI-001, IMPI-019, IMPI-010, IMPI-008, IMPI-031, IMPI-057, IMPI-022, IMPI-035, IMPI-067 or IMPI-072, optionally with 1, 2, 3, 4 or 5 amino acid alterations outside the complementarity determining regions (CDRs) in the variable heavy (VH) domain sequence and optionally with 1, 2, 3, 4 or 5 amino acid alterations outside the complementarity determining regions (CDRs) in the variable light (VL) domain sequence.

[0532] In one embodiment, the antibody comprises a variable heavy (VH) domain sequence of antibody IMPI-030, optionally with 1, 2, 3, 4 or 5 amino acid alterations outside the complementarity determining regions (CDRs), and a variable light (VL) domain sequence of antibody IMPI-030, optionally with 1, 2, 3, 4 or 5 amino acid alterations outside the complementarity determining regions (CDRs).

[0533] In one embodiment, the antibody comprises a variable heavy (VH) domain sequence of antibody IMPI-053, optionally with 1, 2, 3, 4 or 5 amino acid alterations outside the complementarity determining regions (CDRs), and a variable light (VL) domain sequence of antibody IMPI-053, optionally with 1, 2, 3, 4 or 5 amino acid alterations outside the complementarity determining regions (CDRs).

[0534] In one embodiment, the antibody comprises a variable heavy (VH) domain sequence of antibody IMPI-025, optionally with 1, 2, 3, 4 or 5 amino acid alterations outside the complementarity determining regions (CDRs), and a variable light (VL) domain sequence of antibody IMPI-025, optionally with 1, 2, 3, 4 or 5 amino acid alterations outside the complementarity determining regions (CDRs).

[0535] In one embodiment, the antibody comprises a variable heavy (VH) domain sequence of antibody IMPI-040, optionally with 1, 2, 3, 4 or 5 amino acid alterations outside the complementarity determining regions (CDRs), and a variable light (VL) domain sequence of antibody IMPI-040, optionally with 1, 2, 3, 4 or 5 amino acid alterations outside the complementarity determining regions (CDRs).

[0536] In one embodiment, the antibody comprises a variable heavy (VH) domain sequence of antibody IMPI-007, optionally with 1, 2, 3, 4 or 5 amino acid alterations outside the complementarity determining regions (CDRs), and a variable light (VL) domain sequence of antibody IMPI-007, optionally with 1, 2, 3, 4 or 5 amino acid alterations outside the complementarity determining regions (CDRs).

[0537] In one embodiment, the antibody comprises a variable heavy (VH) domain sequence of antibody IMPI-020, optionally with 1, 2, 3, 4 or 5 amino acid alterations outside the complementarity determining regions (CDRs), and a variable light (VL) domain sequence of antibody IMPI-020, optionally with 1, 2, 3, 4 or 5 amino acid alterations outside the complementarity determining regions (CDRs).

[0538] In one embodiment, the antibody comprises a variable heavy (VH) domain sequence of antibody IMPI-032, optionally with 1, 2, 3, 4 or 5 amino acid alterations outside the complementarity determining regions (CDRs), and a variable light (VL) domain sequence of antibody IMPI-032, optionally with 1, 2, 3, 4 or 5 amino acid alterations outside the complementarity determining regions (CDRs).

[0539] In one embodiment, the antibody comprises a variable heavy (VH) domain sequence of antibody IMPI-023, optionally with 1, 2, 3, 4 or 5 amino acid alterations outside the complementarity determining regions (CDRs), and a variable light (VL) domain sequence of antibody IMPI-023, optionally with 1, 2, 3, 4 or 5 amino acid alterations outside the complementarity determining regions (CDRs).

[0540] In one embodiment, the antibody comprises a variable heavy (VH) domain sequence of antibody IMPI-039, optionally with 1, 2, 3, 4 or 5 amino acid alterations outside the complementarity determining regions (CDRs), and a variable light (VL) domain sequence of antibody IMPI-039, optionally with 1, 2, 3, 4 or 5 amino acid alterations outside the complementarity determining regions (CDRs).

[0541] In one embodiment, the antibody comprises a variable heavy (VH) domain sequence of antibody IMPI-001, optionally with 1, 2, 3, 4 or 5 amino acid alterations outside the complementarity determining regions (CDRs), and a variable light (VL) domain sequence of antibody IMPI-001, optionally with 1, 2, 3, 4 or 5 amino acid alterations outside the complementarity determining regions (CDRs).

[0542] In one embodiment, the antibody comprises a variable heavy (VH) domain sequence of antibody IMPI-019, optionally with 1, 2, 3, 4 or 5 amino acid alterations outside the complementarity determining regions (CDRs), and a variable light (VL) domain sequence of antibody IMPI-019, optionally with 1, 2, 3, 4 or 5 amino acid alterations outside the complementarity determining regions (CDRs).

[0543] In one embodiment, the antibody comprises a variable heavy (VH) domain sequence of antibody IMPI-010, optionally with 1, 2, 3, 4 or 5 amino acid alterations outside the complementarity determining regions (CDRs), and a variable light (VL) domain sequence of antibody IMPI-010, optionally with 1, 2, 3, 4 or 5 amino acid alterations outside the complementarity determining regions (CDRs).

[0544] In one embodiment, the antibody comprises a variable heavy (VH) domain sequence of antibody IMPI-008, optionally with 1, 2, 3, 4 or 5 amino acid alterations outside the complementarity determining regions (CDRs), and a variable light (VL) domain sequence of antibody IMPI-008, optionally with 1, 2, 3, 4 or 5 amino acid alterations outside the complementarity determining regions (CDRs).

[0545] In one embodiment, the antibody comprises a variable heavy (VH) domain sequence of antibody IMPI-031, optionally with 1, 2, 3, 4 or 5 amino acid alterations outside the complementarity determining regions (CDRs), and a variable light (VL) domain sequence of antibody IMPI-031, optionally with 1, 2, 3, 4 or 5 amino acid alterations outside the complementarity determining regions (CDRs).

[0546] In one embodiment, the antibody comprises a variable heavy (VH) domain sequence of antibody IMPI-057, optionally with 1, 2, 3, 4 or 5 amino acid alterations outside the complementarity determining regions (CDRs), and a variable light (VL) domain sequence of antibody IMPI-057, optionally with 1, 2, 3, 4 or 5 amino acid alterations outside the complementarity determining regions (CDRs).

[0547] In one embodiment, the antibody comprises a variable heavy (VH) domain sequence of antibody IMPI-022, optionally with 1, 2, 3, 4 or 5 amino acid alterations outside the complementarity determining regions (CDRs), and a variable light (VL) domain sequence of antibody IMPI-022, optionally with 1, 2, 3, 4 or 5 amino acid alterations outside the complementarity determining regions (CDRs).

[0548] In one embodiment, the antibody comprises a variable heavy (VH) domain sequence of antibody IMPI-035, optionally with 1, 2, 3, 4 or 5 amino acid alterations outside the complementarity determining regions (CDRs), and a variable light (VL) domain sequence of antibody IMPI-035, optionally with 1, 2, 3, 4 or 5 amino acid alterations outside the complementarity determining regions (CDRs).

[0549] In one embodiment, the antibody comprises a variable heavy (VH) domain sequence of antibody IMPI-067, optionally with 1, 2, 3, 4 or 5 amino acid alterations outside the complementarity determining regions (CDRs), and a variable light (VL) domain sequence of antibody IMPI-067, optionally with 1, 2, 3, 4 or 5 amino acid alterations outside the complementarity determining regions (CDRs).

[0550] In one embodiment, the antibody comprises a variable heavy (VH) domain sequence of antibody IMPI-072, optionally with 1, 2, 3, 4 or 5 amino acid alterations outside the complementarity determining regions (CDRs), and a variable light (VL) domain sequence of antibody IMPI-072, optionally with 1, 2, 3, 4 or 5 amino acid alterations outside the complementarity determining regions (CDRs).

[0551] In one embodiment, the antibody comprises a variable heavy (VH) domain sequence and a variable light (VL) domain sequence and wherein the variable heavy (VH) domain and variable light (VL) domain sequences respectively comprise a sequence having at least 90% identity to the variable heavy (VH) and variable light (VL) domain sequences of antibody IMPI-030, IMPI-053, IMPI-025, IMPI-040, IMPI-007, IMPI-020, IMPI-032, IMPI-023, IMPI-039, IMPI-001, IMPI-019, IMPI-010, IMPI-008, IMPI-031, IMPI-057, IMPI-022, IMPI-035, IMPI-067 or IMPI-072, provided that the antibody has the CDRs of antibody IMPI-030, IMPI-053, IMPI-025, IMPI-040, IMPI-007, IMPI-020, IMPI-032, IMPI-023, IMPI-039, IMPI-001, IMPI-019, IMPI-010, IMPI-008, IMPI-031, IMPI-057, IMPI-022, IMPI-035, IMPI-067 or IMPI-072.

[0552] In one embodiment, the variable heavy (VH) domain sequence comprises a sequence having at least 90% identity to the VH domain sequence of antibody IMPI-030 and the variable light (VL) domain sequence comprises a sequence having at least 90% identity to the VL domain sequence of antibody IMPI-030, provided that the antibody has the CDRs of antibody IMPI-030.

[0553] In one embodiment, variable heavy (VH) domain sequence comprises a sequence having at least 90% identity to the VH domain sequence of antibody IMPI-053 and the variable light (VL) domain sequence comprises a sequence having at least 90% identity to the VL domain sequence of antibody IMPI-053, provided that the antibody has the CDRs of antibody IMPI-053.

[0554] In one embodiment, the variable heavy (VH) domain sequence comprises a sequence having at least 90% identity to the VH domain sequence of antibody IMPI-025 and the variable light (VL) domain sequence comprises a sequence having at least 90% identity to the VL domain sequence of antibody IMPI-025, provided that the antibody has the CDRs of antibody IMPI-025.

[0555] In one embodiment, the variable heavy (VH) domain sequence comprises a sequence having at least 90% identity to the VH domain sequence of antibody IMPI-040 and the variable light (VL) domain sequence comprises a sequence having at least 90% identity to the VL domain sequence of antibody IMPI-040, provided that the antibody has the CDRs of antibody IMPI-040.

[0556] In one embodiment, the variable heavy (VH) domain sequence comprises a sequence having at least 90% identity to the VH domain sequence of antibody IMPI-007 and the variable light (VL) domain sequence comprises a sequence having at least 90% identity to the VL domain sequence of antibody IMPI-007, provided that the antibody has the CDRs of antibody IMPI-007.

[0557] In one embodiment, the variable heavy (VH) domain sequence comprises a sequence having at least 90% identity to the VH domain sequence of antibody IMPI-020 and the variable light (VL) domain sequence comprises a sequence having at least 90% identity to the VL domain sequence of antibody IMPI-020, provided that the antibody has the CDRs of antibody IMPI-020.

[0558] In one embodiment, the variable heavy (VH) domain sequence comprises a sequence having at least 90% identity to the VH domain sequence of antibody IMPI-032 and the variable light (VL) domain sequence comprises a sequence having at least 90% identity to the VL domain sequence of antibody IMPI-032, provided that the antibody has the CDRs of antibody IMPI-032.

[0559] In one embodiment, the variable heavy (VH) domain sequence comprises a sequence having at least 90% identity to the VH domain sequence of antibody IMPI-023 and the variable light (VL) domain sequence comprises a sequence having at least 90% identity to the VL domain sequence of antibody IMPI-023, provided that the antibody has the CDRs of antibody IMPI-023.

[0560] In one embodiment, the variable heavy (VH) domain sequence comprises a sequence having at least 90% identity to the VH domain sequence of antibody IMPI-039 and the variable light (VL) domain sequence comprises a sequence having at least 90% identity to the VL domain sequence of antibody IMPI-039, provided that the antibody has the CDRs of antibody IMPI-039.

[0561] In one embodiment, the variable heavy (VH) domain sequence comprises a sequence having at least 90% identity to the VH domain sequence of antibody IMPI-001 and the variable light (VL) domain sequence comprises a sequence having at least 90% identity to the VL domain sequence of antibody IMPI-001, provided that the antibody has the CDRs of antibody IMPI-001.

[0562] In one embodiment, the variable heavy (VH) domain sequence comprises a sequence having at least 90% identity to the VH domain sequence of antibody IMPI-019 and the variable light (VL) domain sequence comprises a sequence having at least 90% identity to the VL domain sequence of antibody IMPI-019, provided that the antibody has the CDRs of antibody IMPI-019.

[0563] In one embodiment, the variable heavy (VH) domain sequence comprises a sequence having at least 90% identity to the VH domain sequence of antibody IMPI-010 and the variable light (VL) domain sequence comprises a sequence having at least 90% identity to the VL domain sequence of antibody IMPI-010, provided that the antibody has the CDRs of antibody IMPI-010.

[0564] In one embodiment, the variable heavy (VH) domain sequence comprises a sequence having at least 90% identity to the VH domain sequence of antibody IMPI-008 and the variable light (VL) domain sequence comprises a sequence having at least 90% identity to the VL domain sequence of antibody IMPI-008, provided that the antibody has the CDRs of antibody IMPI-008.

[0565] In one embodiment, the variable heavy (VH) domain sequence comprises a sequence having at least 90% identity to the VH domain sequence of antibody IMPI-031 and the variable light (VL) domain sequence comprises a sequence having at least 90% identity to the VL domain sequence of antibody IMPI-031, provided that the antibody has the CDRs of antibody IMPI-031.

[0566] In one embodiment, the variable heavy (VH) domain sequence comprises a sequence having at least 90% identity to the VH domain sequence of antibody IMPI-057 and the variable light (VL) domain sequence comprises a sequence having at least 90% identity to the VL domain sequence of antibody IMPI-057, provided that the antibody has the CDRs of antibody IMPI-057.

[0567] In one embodiment, the variable heavy (VH) domain sequence comprises a sequence having at least 90% identity to the VH domain sequence of antibody IMPI-022 and the variable light (VL) domain sequence comprises a sequence having at least 90% identity to the VL domain sequence of antibody IMPI-022, provided that the antibody has the CDRs of antibody IMPI-022.

[0568] In one embodiment, the variable heavy (VH) domain sequence comprises a sequence having at least 90% identity to the VH domain sequence of antibody IMPI-035 and the variable light (VL) domain sequence comprises a sequence having at least 90% identity to the VL domain sequence of antibody IMPI-035, provided that the antibody has the CDRs of antibody IMPI-035.

[0569] In one embodiment, the variable heavy (VH) domain sequence comprises a sequence having at least 90% identity to the VH domain sequence of antibody IMPI-067 and the variable light (VL) domain sequence comprises a sequence having at least 90% identity to the VL domain sequence of antibody IMPI-067, provided that the antibody has the CDRs of antibody IMPI-067.

[0570] In one embodiment, the variable heavy (VH) domain sequence comprises a sequence having at least 90% identity to the VH domain sequence of antibody IMPI-072 and the variable light (VL) domain sequence comprises a sequence having at least 90% identity to the VL domain sequence of antibody IMPI-072, provided that the antibody has the CDRs of antibody IMPI-072.

[0571] In one embodiment, the antibody comprises a variable heavy (VH) domain sequence and a variable light (VL) domain sequence and wherein the variable heavy (VH) domain and variable light (VL) domain sequences respectively comprise the variable heavy (VH) and variable light (VL) domain sequences of antibody IMPI-030, IMPI-053, IMPI-025, IMPI-040, IMPI-007, IMPI-020, IMPI-032, IMPI-023, IMPI-039, IMPI-001, IMPI-019, IMPI-010, IMPI-008, IMPI-031, IMPI-057, IMPI-022, IMPI-035, IMPI-067 or IMPI-072.

[0572] In one embodiment, the present invention provides an anti-SARS-CoV-2 antibody, wherein the antibody comprises a variable heavy (VH) domain sequence and a variable light (VL) domain sequence and wherein the variable heavy (VH) domain and variable light (VL) domain sequences respectively comprise the variable heavy (VH) and variable light (VL) domain sequences of antibody IMPI-030, IMPI-053, IMPI-025, IMPI-040, IMPI-007, IMPI-020, IMPI-032, IMPI-023, IMPI-039, IMPI-001, IMPI-019, IMPI-010, IMPI-008, IMPI-031, IMPI-057, IMPI-022, IMPI-035, IMPI-067 or IMPI-072.

[0573] In one embodiment, the variable heavy (VH) domain sequence comprises the VH domain sequence of antibody IMPI-030 and the variable light (VL) domain sequence comprises the VL domain sequence of antibody IMPI-030.

[0574] In one embodiment, the variable heavy (VH) domain sequence comprises the VH domain sequence of antibody IMPI-053 and the variable light (VL) domain sequence comprises the VL domain sequence of antibody IMPI-053.

[0575] In one embodiment, the variable heavy (VH) domain sequence comprises the VH domain sequence of antibody IMPI-025 and the variable light (VL) domain sequence comprises the VL domain sequence of antibody IMPI-025.

[0576] In one embodiment, the variable heavy (VH) domain sequence comprises the VH domain sequence of antibody IMPI-040 and the variable light (VL) domain sequence comprises the VL domain sequence of antibody IMPI-040.

[0577] In one embodiment, the variable heavy (VH) domain sequence comprises the VH domain sequence of antibody IMPI-007 and the variable light (VL) domain sequence comprises the VL domain sequence of antibody IMPI-007.

[0578] In one embodiment, the variable heavy (VH) domain sequence comprises the VH domain sequence of antibody IMPI-020 and the variable light (VL) domain sequence comprises the VL domain sequence of antibody IMPI-020.

[0579] In one embodiment, the variable heavy (VH) domain sequence comprises the VH domain sequence of antibody IMPI-032 and the variable light (VL) domain sequence comprises the VL domain sequence of antibody IMPI-032.

[0580] In one embodiment, the variable heavy (VH) domain sequence comprises the VH domain sequence of antibody IMPI-023 and the variable light (VL) domain sequence comprises the VL domain sequence of antibody IMPI-023.

[0581] In one embodiment, the variable heavy (VH) domain sequence comprises the VH domain sequence of antibody IMPI-039 and the variable light (VL) domain sequence comprises the VL domain sequence of antibody IMPI-039.

[0582] In one embodiment, the variable heavy (VH) domain sequence comprises the VH domain sequence of antibody IMPI-001 and the variable light (VL) domain sequence comprises the VL domain sequence of antibody IMPI-001.

[0583] In one embodiment, the variable heavy (VH) domain sequence comprises the VH domain sequence of antibody IMPI-019 and the variable light (VL) domain sequence comprises the VL domain sequence of antibody IMPI-019.

[0584] In one embodiment, the variable heavy (VH) domain sequence comprises the VH domain sequence of antibody IMPI-010 and the variable light (VL) domain sequence comprises the VL domain sequence of antibody IMPI-010.

[0585] In one embodiment, the variable heavy (VH) domain sequence comprises the VH domain sequence of antibody IMPI-008 and the variable light (VL) domain sequence comprises the VL domain sequence of antibody IMPI-008.

[0586] In one embodiment, the variable heavy (VH) domain sequence comprises the VH domain sequence of antibody IMPI-031 and the variable light (VL) domain sequence comprises the VL domain sequence of antibody IMPI-031.

[0587] In one embodiment, the variable heavy (VH) domain sequence comprises the VH domain sequence of antibody IMPI-057 and the variable light (VL) domain sequence comprises the VL domain sequence of antibody IMPI-057.

[0588] In one embodiment, the variable heavy (VH) domain sequence comprises the VH domain sequence of antibody IMPI-022 and the variable light (VL) domain sequence comprises the VL domain sequence of antibody IMPI-022.

[0589] In one embodiment, the variable heavy (VH) domain sequence comprises the VH domain sequence of antibody IMPI-035 and the variable light (VL) domain sequence comprises the VL domain sequence of antibody IMPI-035.

[0590] In one embodiment, the variable heavy (VH) domain sequence comprises the VH domain sequence of antibody IMPI-067 and the variable light (VL) domain sequence comprises the VL domain sequence of antibody IMPI-067.

[0591] In one embodiment, the variable heavy (VH) domain sequence comprises the VH domain sequence of antibody IMPI-072 and the variable light (VL) domain sequence comprises the VL domain sequence of antibody IMPI-072.

[0592] In one embodiment, the antibody comprises VH and/or VL domain framework regions of human germline gene segment sequences.

[0593] In one embodiment, the antibody comprises an antibody VH domain which
[0594] i) is derived from recombination of a human heavy chain V gene segment, a human heavy chain D gene segment and a human heavy chain J gene segment, wherein
   [0595] the V gene segment is IGHV4-4*02, IGHV3-9*01 or IGHV3-30*18;
   [0596] and/or
   [0597] the J gene segment is IGHJ4*02 or IGHJ6*02, or
[0598] ii) comprises framework regions FR1, FR2, FR3 and FR4, wherein
   [0599] FR1 aligns with human germline V gene segment IGHV4-4*02, IGHV3-9*01 or IGHV3-30*18 with up to 1, 2, 3, 4, or 5 amino acid alterations,
   [0600] FR2 aligns with human germline V gene segment IGHV4-4*02, IGHV3-9*01 or IGHV3-30*18 with up to 1, 2, 3, 4, or 5 amino acid alterations,
   [0601] FR3 aligns with human germline V gene segment IGHV4-4*02, IGHV3-9*01 or IGHV3-30*18 with up to 1, 2, 3, 4, or 5 amino acid alterations, and/or
   [0602] FR4 aligns with human germline J gene segment IGHJ4*02 or IGHJ6*02 with up to 1, 2, 3, 4 or 5 amino acid alterations.

[0603] In one embodiment, the antibody comprises an antibody VH domain which
[0604] i) is derived from recombination of a human heavy chain V gene segment IGHV4-4*02, IGHV3-9*01 or IGHV3-30*18, a human heavy chain D gene segment and a human heavy chain J gene segment, or
[0605] ii) comprises framework regions FR1, FR2, FR3 and FR4, wherein FR1, FR2 and FR3 each align with human germline V segment IGHV4-4*02, IGHV3-9*01 or IGHV3-30*18 with up to 1, 2, 3, 4 or 5 amino acid alterations.

[0606] In one embodiment, the J gene segment is IGHJ4*02 or IGHJ6*02, or the VH domain framework region FR4 aligns with human germline J gene segment IGHJ4*02 or IGHJ6*02 with 1, 2, 3, 4 or 5 amino acid alterations.

[0607] In one embodiment, the antibody comprises an antibody VL domain which
[0608] i) is derived from recombination of a human light chain V gene segment and a human light chain J gene segment, wherein
   [0609] the V gene segment is IGKV2D-30*01, IGKV1D-13*d01 or IGKV3-20*01, and/or
   [0610] the J gene segment is IGKJ4*01 or
[0611] ii) comprises framework regions FR1, FR2, FR3 and FR4, wherein
   [0612] FR1 aligns with human germline V gene segment IGKV2D-30*01, IGKV1D-13*d01 or IGKV3-20*01 with up to 1, 2, 3, 4, or 5 amino acid alterations,
   [0613] FR2 aligns with human germline V gene segment IGKV2D-30*01, IGKV1D-13*d01 or IGKV3-20*01 with up to 1, 2, 3, 4, or 5 amino acid alterations
   [0614] FR3 aligns with human germline V gene segment IGKV2D-30*01, IGKV1D-13*d01 or IGKV3-20*01 with up to 1, 2, 3, 4 or 5 amino acid alterations, and/or
   [0615] FR4 aligns with human germline J gene segment IGKJ4*01 with up to 1, 2, 3, 4 or 5 amino acid alterations.

[0616] In one embodiment, the antibody comprises an antibody VL domain derived from recombination of a human light chain V gene segment and a human light chain J gene segment, wherein:
[0617] the V gene segment is IGKV2D-30*01, IGKV1D-13*d01 or IGKV3-20*01, and optionally the J gene segment is IGKJ4*01.

[0618] Example combinations of v and j gene segments for heavy and light chain variable domains are shown in Table 3, and these represent preferred combinations. The heavy and light chain variable domains may optionally be derived from the v and j gene segments identified in Table 3 for any one individual IMPI antibody identified in this Group B section.

### Group C—S2 Binders:

[0619] In a third aspect, the present invention provides a neutralising antibody that specifically binds to the S2 subunit of the SARS-CoV-2 spike protein.

[0620] In one embodiment, the antibody neutralises SARS-CoV-2 with an IC50 of 10 nM or lower (e.g. as measured in a pseudovirus neutralisation assay).

[0621] In one embodiment, the antibody neutralises SARS-CoV-2 with an IC50 of 5 nM or lower (e.g. as measured in a pseudovirus neutralisation assay).

[0622] In one embodiment, the antibody neutralises SARS-CoV-2 with an IC50 of 3 nM or lower (e.g. as measured in a pseudovirus neutralisation assay).

[0623] In one embodiment, the antibody comprises a variable heavy (VH) domain sequence comprising complementarity determining regions (CDRs) HCDR1, HCDR2 and HCDR3, and a variable light (VL) domain sequence comprising complementarity determining regions LCDR1, LCDR2 and LCDR3, wherein the HCDR3 is the HCDR3 of antibody IMPI-003, IMPI-013, IMPI-063, IMPI-061, IMPI-062, IMPI-064, IMPI-065, IMPI-066, IMPI-069, IMPI-070 or IMPI-071.

[0624] In one embodiment, the HCDR3 is the HCDR3 of antibody IMPI-003.

[0625] In one embodiment, the HCDR3 is the HCDR3 of antibody IMPI-013.

[0626] In one embodiment, the HCDR3 is the HCDR3 of antibody IMPI-063.

[0627] In one embodiment, the HCDR3 is the HCDR3 of antibody IMPI-061.

[0628] In one embodiment, the HCDR3 is the HCDR3 of antibody IMPI-062.

[0629] In one embodiment, the HCDR3 is the HCDR3 of antibody IMPI-064.

[0630] In one embodiment, the HCDR3 is the HCDR3 of antibody IMPI-065.

[0631] In one embodiment, the HCDR3 is the HCDR3 of antibody IMPI-066.

[0632] In one embodiment, the HCDR3 is the HCDR3 of antibody IMPI-069.

[0633] In one embodiment, the HCDR3 is the HCDR3 of antibody IMPI-070.

[0634] In one embodiment, the HCDR3 is the HCDR3 of antibody IMPI-071.

[0635] In one embodiment, the present invention provides an anti-SARS-CoV-2 antibody,

wherein the antibody comprises a variable heavy (VH) domain sequence comprising complementarity determining regions (CDRs) HCDR1, HCDR2, and HCDR3, and a variable light (VL) domain sequence comprising complementarity determining regions LCDR1, LCDR2 and LCDR3,
wherein the CDRs are those of antibody IMPI-003, IMPI-013, IMPI-063, IMPI-061, IMPI-062, IMPI-064, IMPI-065, IMPI-066, IMPI-069, IMPI-070 or IMPI-071.

[0636] In one embodiment, the antibody comprises a variable heavy (VH) domain sequence comprising complementarity determining regions (CDRs) HCDR1, HCDR2, and HCDR3, and a variable light (VL) domain sequence comprising complementarity determining regions LCDR1, LCDR2 and LCDR3, wherein the CDRs are those of antibody IMPI-003, IMPI-013, IMPI-063, IMPI-061, IMPI-062, IMPI-064, IMPI-065, IMPI-066, IMPI-069, IMPI-070 or IMPI-071.

[0637] In one embodiment, the antibody has the CDRs of antibody IMPI-003.

[0638] In one embodiment, the antibody has the CDRs of antibody IMPI-013.

[0639] In one embodiment, the antibody has the CDRs of antibody IMPI-063.

[0640] In one embodiment, the antibody has the CDRs of antibody IMPI-061.

[0641] In one embodiment, the antibody has the CDRs of antibody IMPI-062.

[0642] In one embodiment, the antibody has the CDRs of antibody IMPI-064.

[0643] In one embodiment, the antibody has the CDRs of antibody IMPI-065.

[0644] In one embodiment, the antibody has the CDRs of antibody IMPI-066.

[0645] In one embodiment, the antibody has the CDRs of antibody IMPI-069.

[0646] In one embodiment, the antibody has the CDRs of antibody IMPI-070.

[0647] In one embodiment, the antibody has the CDRs of antibody IMPI-071.

[0648] In one embodiment, the antibody comprises a variable heavy (VH) domain sequence and a variable light (VL) domain sequence and wherein the variable heavy (VH) domain and variable light (VL) domain sequences respectively comprise the variable heavy (VH) domain and variable light (VL) domain sequences of antibody IMPI-003, IMPI-013, IMPI-063, IMPI-061, IMPI-062, IMPI-064, IMPI-065, IMPI-066, IMPI-069, IMPI-070 or IMPI-071, optionally with 1, 2, 3, 4 or 5 amino acid alterations outside the complementarity determining regions (CDRs) in the variable heavy (VH) domain sequence and optionally with 1, 2, 3, 4 or 5 amino acid alterations outside the complementarity determining regions (CDRs) in the variable light (VL) domain sequence.

[0649] In one embodiment, wherein the antibody comprises a variable heavy (VH) domain sequence of antibody IMPI-003, optionally with 1, 2, 3, 4 or 5 amino acid alterations outside the complementarity determining regions (CDRs), and a variable light (VL) domain sequence of antibody IMPI-003, optionally with 1, 2, 3, 4 or 5 amino acid alterations outside the complementarity determining regions (CDRs).

[0650] In one embodiment, the antibody comprises a variable heavy (VH) domain sequence of antibody IMPI-013, optionally with 1, 2, 3, 4 or 5 amino acid alterations outside the complementarity determining regions (CDRs), and a variable light (VL) domain sequence of antibody IMPI-013, optionally with 1, 2, 3, 4 or 5 amino acid alterations outside the complementarity determining regions (CDRs).

[0651] In one embodiment, the antibody comprises a variable heavy (VH) domain sequence of antibody IMPI-063, optionally with 1, 2, 3, 4 or 5 amino acid alterations outside the complementarity determining regions (CDRs), and a variable light (VL) domain sequence of antibody IMPI-063, optionally with 1, 2, 3, 4 or 5 amino acid alterations outside the complementarity determining regions (CDRs).

[0652] In one embodiment, the antibody comprises a variable heavy (VH) domain sequence of antibody IMPI-061, optionally with 1, 2, 3, 4 or 5 amino acid alterations outside the complementarity determining regions (CDRs), and a variable light (VL) domain sequence of antibody IMPI-061, optionally with 1, 2, 3, 4 or 5 amino acid alterations outside the complementarity determining regions (CDRs).

[0653] In one embodiment, the antibody comprises a variable heavy (VH) domain sequence of antibody IMPI-062, optionally with 1, 2, 3, 4 or 5 amino acid alterations outside the complementarity determining regions (CDRs), and a variable light (VL) domain sequence of antibody IMPI-062, optionally with 1, 2, 3, 4 or 5 amino acid alterations outside the complementarity determining regions (CDRs).

[0654] In one embodiment, the antibody comprises a variable heavy (VH) domain sequence of antibody IMPI-064, optionally with 1, 2, 3, 4 or 5 amino acid alterations outside the complementarity determining regions (CDRs), and a variable light (VL) domain sequence of antibody IMPI-064, optionally with 1, 2, 3, 4 or 5 amino acid alterations outside the complementarity determining regions (CDRs).

[0655] In one embodiment, the antibody comprises a variable heavy (VH) domain sequence of antibody IMPI-065, optionally with 1, 2, 3, 4 or 5 amino acid alterations outside the complementarity determining regions (CDRs), and a variable light (VL) domain sequence of antibody IMPI-065, optionally with 1, 2, 3, 4 or 5 amino acid alterations outside the complementarity determining regions (CDRs).

[0656] In one embodiment, the antibody comprises a variable heavy (VH) domain sequence of antibody IMPI-066, optionally with 1, 2, 3, 4 or 5 amino acid alterations outside the complementarity determining regions (CDRs), and a variable light (VL) domain sequence of antibody IMPI-066, optionally with 1, 2, 3, 4 or 5 amino acid alterations outside the complementarity determining regions (CDRs).

[0657] In one embodiment, the antibody comprises a variable heavy (VH) domain sequence of antibody IMPI-069, optionally with 1, 2, 3, 4 or 5 amino acid alterations outside the complementarity determining regions (CDRs), and a variable light (VL) domain sequence of antibody IMPI-069, optionally with 1, 2, 3, 4 or 5 amino acid alterations outside the complementarity determining regions (CDRs).

[0658] In one embodiment, the antibody comprises a variable heavy (VH) domain sequence of antibody IMPI-070, optionally with 1, 2, 3, 4 or 5 amino acid alterations outside the complementarity determining regions (CDRs), and a variable light (VL) domain sequence of antibody IMPI-070, optionally with 1, 2, 3, 4 or 5 amino acid alterations outside the complementarity determining regions (CDRs).

[0659] In one embodiment, the antibody comprises a variable heavy (VH) domain sequence of antibody IMPI-071, optionally with 1, 2, 3, 4 or 5 amino acid alterations outside the complementarity determining regions (CDRs), and a variable light (VL) domain sequence of antibody IMPI-071, optionally with 1, 2, 3, 4 or 5 amino acid alterations outside the complementarity determining regions (CDRs).

[0660] In one embodiment, the antibody comprises a variable heavy (VH) domain sequence and a variable light (VL) domain sequence and wherein the variable heavy (VH) domain and variable light (VL) domain sequences respectively comprise a sequence having at least 90% identity to the variable heavy (VH) and variable light (VL) domain sequences of antibody IMPI-003, IMPI-013, IMPI-063, IMPI-061, IMPI-062, IMPI-064, IMPI-065, IMPI-066, IMPI-069, IMPI-070 or IMPI-071, provided that the antibody has the CDRs of antibody IMPI-003, IMPI-013, IMPI-063, IMPI-061, IMPI-062, IMPI-064, IMPI-065, IMPI-066, IMPI-069, IMPI-070 or IMPI-071.

[0661] In one embodiment, the variable heavy (VH) domain sequence comprises a sequence having at least 90% identity to the VH domain sequence of antibody IMPI-003 and the variable light (VL) domain sequence comprises a sequence having at least 90% identity to the VL domain sequence of antibody IMPI-003, provided that the antibody has the CDRs of antibody IMPI-003.

[0662] In one embodiment, the variable heavy (VH) domain sequence comprises a sequence having at least 90% identity to the VH domain sequence of antibody IMPI-013 and the variable light (VL) domain sequence comprises a sequence having at least 90% identity to the VL domain sequence of antibody IMPI-013, provided that the antibody has the CDRs of antibody IMPI-013.

[0663] In one embodiment, the variable heavy (VH) domain sequence comprises a sequence having at least 90% identity to the VH domain sequence of antibody IMPI-063 and the variable light (VL) domain sequence comprises a sequence having at least 90% identity to the VL domain sequence of antibody IMPI-063, provided that the antibody has the CDRs of antibody IMPI-063.

[0664] In one embodiment, the variable heavy (VH) domain sequence comprises a sequence having at least 90% identity to the VH domain sequence of antibody IMPI-061 and the variable light (VL) domain sequence comprises a sequence having at least 90% identity to the VL domain sequence of antibody IMPI-061, provided that the antibody has the CDRs of antibody IMPI-061.

[0665] In one embodiment, the variable heavy (VH) domain sequence comprises a sequence having at least 90% identity to the VH domain sequence of antibody IMPI-062 and the variable light (VL) domain sequence comprises a sequence having at least 90% identity to the VL domain sequence of antibody IMPI-062, provided that the antibody has the CDRs of antibody IMPI-062.

[0666] In one embodiment, the variable heavy (VH) domain sequence comprises a sequence having at least 90% identity to the VH domain sequence of antibody IMPI-064 and the variable light (VL) domain sequence comprises a sequence having at least 90% identity to the VL domain sequence of antibody IMPI-064, provided that the antibody has the CDRs of antibody IMPI-064.

[0667] In one embodiment, the variable heavy (VH) domain sequence comprises a sequence having at least 90% identity to the VH domain sequence of antibody IMPI-065 and the variable light (VL) domain sequence comprises a sequence having at least 90% identity to the VL domain sequence of antibody IMPI-065, provided that the antibody has the CDRs of antibody IMPI-065.

[0668] In one embodiment, the variable heavy (VH) domain sequence comprises a sequence having at least 90% identity to the VH domain sequence of antibody IMPI-066 and the variable light (VL) domain sequence comprises a sequence having at least 90% identity to the VL domain sequence of antibody IMPI-066, provided that the antibody has the CDRs of antibody IMPI-066.

[0669] In one embodiment, the variable heavy (VH) domain sequence comprises a sequence having at least 90% identity to the VH domain sequence of antibody IMPI-069 and the variable light (VL) domain sequence comprises a sequence having at least 90% identity to the VL domain sequence of antibody IMPI-069, provided that the antibody has the CDRs of antibody IMPI-069.

[0670] In one embodiment, the variable heavy (VH) domain sequence comprises a sequence having at least 90% identity to the VH domain sequence of antibody IMPI-070 and the variable light (VL) domain sequence comprises a sequence having at least 90% identity to the VL domain sequence of antibody IMPI-070, provided that the antibody has the CDRs of antibody IMPI-070.

[0671] In one embodiment, the variable heavy (VH) domain sequence comprises a sequence having at least 90% identity to the VH domain sequence of antibody IMPI-071 and the variable light (VL) domain sequence comprises a sequence having at least 90% identity to the VL domain sequence of antibody IMPI-071, provided that the antibody has the CDRs of antibody IMPI-071.

[0672] In one embodiment, the antibody comprises a variable heavy (VH) domain sequence and a variable light (VL) domain sequence and wherein the variable heavy (VH) domain and variable light (VL) domain sequences respectively comprise the variable heavy (VH) and variable light (VL) domain sequences of antibody IMPI-003, IMPI-013, IMPI-063, IMPI-061, IMPI-062, IMPI-064, IMPI-065, IMPI-066, IMPI-069, IMPI-070 or IMPI-071.

[0673] In one embodiment, the present invention provides an anti-SARS-CoV-2 antibody, wherein the antibody comprises a variable heavy (VH) domain sequence and a variable light (VL) domain sequence and wherein the variable heavy (VH) domain and variable light (VL) domain sequences respectively comprise the variable heavy (VH) and variable light (VL) domain sequences of antibody IMPI-003, IMPI-013, IMPI-063, IMPI-061, IMPI-062, IMPI-064, IMPI-065, IMPI-066, IMPI-069, IMPI-070 or IMPI-071.

[0674] In one embodiment, the variable heavy (VH) domain sequence comprises the VH domain sequence of antibody IMPI-003 and the variable light (VL) domain sequence comprises the VL domain sequence of antibody IMPI-003.

[0675] In one embodiment, the variable heavy (VH) domain sequence comprises the VH domain sequence of antibody IMPI-013 and the variable light (VL) domain sequence comprises the VL domain sequence of antibody IMPI-013.

[0676] In one embodiment, the variable heavy (VH) domain sequence comprises the VH domain sequence of antibody IMPI-063 and the variable light (VL) domain sequence comprises the VL domain sequence of antibody IMPI-063.

[0677] In one embodiment, the variable heavy (VH) domain sequence comprises the VH domain sequence of antibody IMPI-061 and the variable light (VL) domain sequence comprises the VL domain sequence of antibody IMPI-061.

[0678] In one embodiment, the variable heavy (VH) domain sequence comprises the VH domain sequence of antibody IMPI-062 and the variable light (VL) domain sequence comprises the VL domain sequence of antibody IMPI-062.

[0679] In one embodiment, the variable heavy (VH) domain sequence comprises the VH domain sequence of antibody IMPI-064 and the variable light (VL) domain sequence comprises the VL domain sequence of antibody IMPI-064.

[0680] In one embodiment, the variable heavy (VH) domain sequence comprises the VH domain sequence of antibody IMPI-065 and the variable light (VL) domain sequence comprises the VL domain sequence of antibody IMPI-065.

[0681] In one embodiment, the variable heavy (VH) domain sequence comprises the VH domain sequence of antibody IMPI-066 and the variable light (VL) domain sequence comprises the VL domain sequence of antibody IMPI-066.

[0682] In one embodiment, the variable heavy (VH) domain sequence comprises the VH domain sequence of antibody IMPI-069 and the variable light (VL) domain sequence comprises the VL domain sequence of antibody IMPI-069.

[0683] In one embodiment, the variable heavy (VH) domain sequence comprises the VH domain sequence of antibody IMPI-070 and the variable light (VL) domain sequence comprises the VL domain sequence of antibody IMPI-070.

[0684] In one embodiment, the variable heavy (VH) domain sequence comprises the VH domain sequence of antibody IMPI-071 and the variable light (VL) domain sequence comprises the VL domain sequence of antibody IMPI-071.

[0685] In one embodiment, the antibody comprises VH and/or VL domain framework regions of human germline gene segment sequences.

[0686] In one embodiment, the antibody comprises an antibody VH domain which
[0687] i) is derived from recombination of a human heavy chain V gene segment, a human heavy chain D gene segment and a human heavy chain J gene segment, wherein the V gene segment is IGHV3-9*01 or IGHV3-20*d01;
[0688] and/or the J gene segment is IGHJ6*02 or IGHJ4*02, or
[0689] ii) comprises framework regions FR1, FR2, FR3 and FR4, wherein FR1 aligns with human germline V gene segment IGHV3-9*01 or IGHV3-20*d01 with up to 1, 2, 3, 4, or 5 amino acid alterations, FR2 aligns with human germline V gene segment IGHV3-9*01 or IGHV3-20*d01 with up to 1, 2, 3, 4, or 5 amino acid alterations, FR3 aligns with human germline V gene segment IGHV3-9*01 or IGHV3-20*d01 with up to 1, 2, 3, 4, or 5 amino acid alterations, and/or FR4 aligns with human germline J gene segment IGHJ6*02 or IGHJ4*02 with up to 1, 2, 3, 4 or 5 amino acid alterations.

[0690] In one embodiment, the antibody comprises an antibody VH domain which
[0691] i) is derived from recombination of a human heavy chain V gene segment IGHV3-9*01 or IGHV3-20*d01, a human heavy chain D gene segment and a human heavy chain J gene segment, or
[0692] ii) comprises framework regions FR1, FR2, FR3 and FR4, wherein FR1, FR2 and FR3 each align with human germline V segment IGHV3-9*01 or IGHV3-20*d01 with up to 1, 2, 3, 4 or 5 amino acid alterations.

[0693] In one embodiment, the J gene segment is IGHJ6*02 or IGHJ4*02, or the VH domain framework region FR4 aligns with human germline J gene segment IGHJ6*02 or IGHJ4*02 with 1, 2, 3, 4 or 5 amino acid alterations.

[0694] In one embodiment, the antibody comprises an antibody VL domain which
[0695] i) is derived from recombination of a human light chain V gene segment and a human light chain J gene segment, wherein the V gene segment is IGKV1-6*01 or IGKV3-20*01, and/or the J gene segment is IGKJ1*01 or IGKJ2*04; or
[0696] ii) comprises framework regions FR1, FR2, FR3 and FR4, wherein FR1 aligns with human germline V gene segment IGKV1-6*01 or IGKV3-20*01 with up to 1, 2, 3, 4, or 5 amino acid alterations, FR2 aligns with human germline V gene segment IGKV1-6*01 or IGKV3-20*01 with up to 1, 2, 3, 4, or 5 amino acid alterations FR3 aligns with human germline V gene segment IGKV1-6*01 or IGKV3-20*01 with up to 1, 2, 3, 4 or 5 amino acid alterations, and/or FR4 aligns with human germline J gene segment IGKJ1*01 or IGKJ2*04 with up to 1, 2, 3, 4 or 5 amino acid alterations.

[0697] In one embodiment, the antibody comprises an antibody VL domain derived from recombination of a human light chain V gene segment and a human light chain J gene segment, wherein: the V gene segment is IGKV1-6*01 or IGKV3-20*01, and optionally the J gene segment is IGKJ1*01 or IGKJ2*04.

[0698] Example combinations of v and j gene segments for heavy and light chain variable domains are shown in Table 3, and these represent preferred combinations. The heavy and light chain variable domains may optionally be derived from the v and j gene segments identified in Table 3 for any one individual IMPI antibody identified in this Group C section.

[0699] Further S2 binders According to the third aspect of the invention, further antibodies are provided herein which specifically bind to the S2 subunit of the SARS-CoV-2 spike protein. For example, antibodies YANG-1201, YANG-1202, YANG-1203, YANG-1204, YANG-1205, YANG-1206, YANG-1207, YANG-2201, YANG-2202, YANG-2203, YANG-2203a, YANG-2203b, YANG-2203c, YANG-2203d, YANG-2203e, YANG-2203f, YANG-2203g, YANG-2203h, YANG-2203i, YANG-2203j, YANG-2203k, YANG-2204, YANG-2205, YANG-2206, YANG-2207, and YANG-2208 as exemplified herein have been found to specifically bind to the S2 subunit of the SARS-CoV-2 spike protein.

[0700] In a first aspect, the present invention provides an antibody that specifically binds to the S2 subunit of the SARS-CoV-2 spike protein.

[0701] In one embodiment, the antibody specifically binds the S2 subunit of the SARS-CoV-2 spike protein with a KD of 0.1 nM or lower (e.g. as measured by surface plasmon resonance (SPR)).

[0702] In one embodiment, the antibody comprises a variable heavy (VH) domain sequence comprising complementarity determining regions (CDRs) HCDR1, HCDR2 and HCDR3, and a variable light (VL) domain sequence comprising complementarity determining regions LCDR1, LCDR2 and LCDR3, wherein the HCDR3 is the HCDR3 of antibody YANG-1201, YANG-1202, YANG-1203, YANG-1204, YANG-1205, YANG-1206, YANG-1207, YANG-2201, YANG-2202, YANG-2203, YANG-2203a, YANG-2203b, YANG-2203c, YANG-2203d, YANG-2203e, YANG-2203f, YANG-2203g, YANG-2203h, YANG-2203i, YANG-2203j, YANG-2203k, YANG-2204, YANG-2205, YANG-2206, YANG-2207, or YANG-2208.

[0703] In one embodiment, the antibody comprises a variable heavy (VH) domain sequence comprising complementarity determining regions (CDRs) HCDR1, HCDR2 and HCDR3, and a variable light (VL) domain sequence comprising complementarity determining regions LCDR1, LCDR2 and LCDR3, wherein HCDR3 is the HCDR3 of antibody YANG-2203, YANG-2204, YANG-2205, YANG-2206, YANG-2207, or YANG-2208.

[0704] In one embodiment, HCDR3 is the HCDR3 of antibody YANG-1201.

[0705] In one embodiment, HCDR3 is the HCDR3 of antibody YANG-1202.

[0706] In one embodiment, HCDR3 is the HCDR3 of antibody YANG-1203.

[0707] In one embodiment, HCDR3 is the HCDR3 of antibody YANG-1204.

[0708] In one embodiment, HCDR3 is the HCDR3 of antibody YANG-1205.

[0709] In one embodiment, HCDR3 is the HCDR3 of antibody YANG-1206.

[0710] In one embodiment, HCDR3 is the HCDR3 of antibody YANG-1207.

[0711] In one embodiment, HCDR3 is the HCDR3 of antibody YANG-2201.

[0712] In one embodiment, HCDR3 is the HCDR3 of antibody YANG-2202.

[0713] In one embodiment, HCDR3 is the HCDR3 of antibody YANG-2203.

[0714] In one embodiment, HCDR3 is the HCDR3 of antibody YANG-2204.

[0715] In one embodiment, HCDR3 is the HCDR3 of antibody YANG-2205.

[0716] In one embodiment, HCDR3 is the HCDR3 of antibody YANG-2206.

[0717] In one embodiment, HCDR3 is the HCDR3 of antibody YANG-2207.

[0718] In one embodiment, HCDR3 is the HCDR3 of antibody YANG-2208.

[0719] In one embodiment, the antibody specifically binds to the S2 subunit of the SARS-CoV-2 spike protein with a KD of 0.1 nM or lower (e.g. as measured by surface plasmon resonance (SPR)) and HCDR3 is the HCDR3 of antibody YANG-1201, YANG-1202, YANG-1203, YANG-1204, YANG-1205, YANG-1206, YANG-1207, YANG-2201, YANG-2202, YANG-2203, YANG-2203a, YANG-2203b, YANG-2203c, YANG-2203d, YANG-2203e, YANG-2203f, YANG-2203g, YANG-2203h, YANG-2203i, YANG-2203j, YANG-2203k, YANG-2204, YANG-2205, YANG-2206, YANG-2207, or YANG-2208.

[0720] In one embodiment, the antibody specifically binds to the S2 subunit of the SARS-CoV-2 spike protein with a KD of 0.1 nM or lower (e.g. as measured by surface plasmon resonance (SPR)) and HCDR3 is the HCDR3 of antibody YANG-2203, YANG-2204, YANG-2205, YANG-2206, YANG-2207, YANG-2208.

[0721] In one embodiment, the antibody specifically binds to the S2 subunit of the SARS-CoV-2 spike protein and neutralises SARS-CoV-2 with at least 35% neutralisation (e.g. as measured in a pseudovirus neutralisation assay), and HCDR3 is the HCDR3 of antibody YANG-2203, YANG-2204, YANG-2205, YANG-2206, YANG-2207, YANG-2208.

[0722] In one embodiment, the antibody specifically binds to the S2 subunit of the SARS-CoV-2 spike protein with a KD of 0.1 nM or lower (e.g. as measured by surface plasmon resonance (SPR)) and neutralises SARS-CoV-2 with at least 35% neutralisation (e.g. as measured in a pseudovirus neutralisation assay), and HCDR3 is the HCDR3 of antibody YANG-2203, YANG-2204, YANG-2205, YANG-2206, YANG-2207, YANG-2208.

[0723] In one embodiment, the present invention provides an anti-SARS-CoV-2, wherein the antibody comprises a variable heavy (VH) domain sequence comprising complementarity determining regions (CDRs) HCDR1, HCDR2, and HCDR3, and a variable light (VL) domain sequence comprising complementarity determining regions LCDR1, LCDR2 and LCDR3, wherein the CDRs are those of antibody YANG-1201, YANG-1202, YANG-1203, YANG-1204, YANG-1205, YANG-1206, YANG-1207, YANG-2201, YANG-2202, YANG-2203, YANG-2203a, YANG-2203b, YANG-2203c, YANG-2203d, YANG-2203e, YANG-2203f, YANG-2203g, YANG-2203h, YANG-2203i, YANG-2203j, YANG-2203k, YANG-2204, YANG-2205, YANG-2206, YANG-2207, or YANG-2208.

[0724] In one embodiment, the present invention provides an anti-SARS-CoV-2 antibody, wherein the antibody comprises a variable heavy (VH) domain sequence comprising complementarity determining regions (CDRs) HCDR1, HCDR2, and HCDR3, and a variable light (VL) domain sequence comprising complementarity determining regions LCDR1, LCDR2 and LCDR3, wherein the CDRs are those of antibody YANG-2203, YANG-2204, YANG-2205, YANG-2206, YANG-2207, or YANG-2208.

[0725] In one embodiment, the antibody has the CDRs of antibody YANG-1201.

[0726] In one embodiment, the antibody has the CDRs of antibody YANG-1202.

[0727] In one embodiment, the antibody has the CDRs of antibody YANG-1203.

[0728] In one embodiment, the antibody has the CDRs of antibody YANG-1204.

[0729] In one embodiment, the antibody has the CDRs of antibody YANG-1205.

[0730] In one embodiment, the antibody has the CDRs of antibody YANG-1206.

[0731] In one embodiment, the antibody has the CDRs of antibody YANG-1207.

[0732] In one embodiment, the antibody has the CDRs of antibody YANG-2201.

[0733] In one embodiment, the antibody has the CDRs of antibody YANG-2202.

[0734] In one embodiment, the antibody has the CDRs of antibody YANG-2203.

[0735] In one embodiment, the antibody has the CDRs of antibody YANG-2204.

[0736] In one embodiment, the antibody has the CDRs of antibody YANG-2205.

[0737] In one embodiment, the antibody has the CDRs of antibody YANG-2206.

[0738] In one embodiment, the antibody has the CDRs of antibody YANG-2207.

[0739] In one embodiment, the antibody has the CDRs of antibody YANG-2208.

[0740] In one embodiment, the present invention provides an anti-SARS-CoV-2, wherein the antibody specifically binds to the S2 subunit of the SARS-CoV-2 spike protein with a KD of 0.1 nM or lower (e.g. as measured by surface plasmon resonance (SPR)), and wherein the antibody comprises a variable heavy (VH) domain sequence comprising complementarity determining regions (CDRs) HCDR1, HCDR2, and HCDR3, and a variable light (VL) domain sequence comprising complementarity determining regions LCDR1, LCDR2 and LCDR3, wherein the CDRs are those of antibody YANG-1201, YANG-1202, YANG-1203, YANG-1204, YANG-1205, YANG-1206, YANG-1207, YANG-2201, YANG-2202, YANG-2203, YANG-2203a, YANG-2203b, YANG-2203c, YANG-2203d, YANG-2203e, YANG-2203f, YANG-2203g, YANG-2203h, YANG-2203i, YANG-2203j, YANG-2203k, YANG-2204, YANG-2205, YANG-2206, YANG-2207, or YANG-2208.

[0741] In one embodiment, the present invention provides an anti-SARS-CoV-2 antibody, wherein the antibody specifically binds to the S2 subunit of the SARS-CoV-2 spike protein with a KD of 0.1 nM or lower (e.g. as measured by surface plasmon resonance (SPR)), and wherein the antibody comprises a variable heavy (VH) domain sequence comprising complementarity determining regions (CDRs) HCDR1, HCDR2, and HCDR3, and a variable light (VL) domain sequence comprising complementarity determining regions LCDR1, LCDR2 and LCDR3, wherein the CDRs are those of antibody YANG-2203, YANG-2204, YANG-2205, YANG-2206, YANG-2207, or YANG-2208.

[0742] In one embodiment, the antibody specifically binds to the S2 subunit of the SARS-CoV-2 spike protein and neutralises SARS-CoV-2 with at least 35% neutralisation (e.g. as measured in a pseudovirus neutralisation assay), and wherein the antibody comprises a variable heavy (VH) domain sequence comprising complementarity determining regions (CDRs) HCDR1, HCDR2, and HCDR3, and a variable light (VL) domain sequence comprising complementarity determining regions LCDR1, LCDR2 and LCDR3, wherein the CDRs are those of antibody YANG-2203, YANG-2204, YANG-2205, YANG-2206, YANG-2207, or YANG-2208.

[0743] In one embodiment, the antibody specifically binds to the S2 subunit of the SARS-CoV-2 spike protein with a KD of 0.1 nM or lower (e.g. as measured by surface plasmon resonance (SPR)) and neutralises SARS-CoV-2 with at least 35% neutralisation (e.g. as measured in a pseudovirus neutralisation assay), and

wherein the antibody comprises a variable heavy (VH) domain sequence comprising complementarity determining regions (CDRs) HCDR1, HCDR2, and HCDR3, and a variable light (VL) domain sequence comprising complementarity determining regions LCDR1, LCDR2 and LCDR3, wherein the CDRs are those of antibody YANG-2203, YANG-2204, YANG-2205, YANG-2206, YANG-2207, or YANG-2208.

[0744] In one embodiment, the antibody comprises a variable heavy (VH) domain sequence and a variable light (VL) domain sequence and wherein the variable heavy (VH) domain and variable light (VL) domain sequences respectively comprise the variable heavy (VH) domain and variable light (VL) domain sequences of antibody YANG-1201, YANG-1202, YANG-1203, YANG-1204, YANG-1205, YANG-1206, YANG-1207, YANG-2201, YANG-2202, YANG-2203, YANG-2203a, YANG-2203b, YANG-2203c, YANG-2203d, YANG-2203e, YANG-2203f, YANG-2203g, YANG-2203h, YANG-2203i, YANG-2203j, YANG-2203k, YANG-2204, YANG-2205, YANG-2206, YANG-2207, or YANG-2208, YANG-2209, YANG-2210, YANG-2211, YANG-2212, YANG-2213, YANG-2214, YANG-2215, YANG-2216, YANG-2217, YANG-2218, YANG-2219, YANG-2220, YANG-2221, YANG-2222, YANG-2223, YANG-2224, YANG-2225, YANG-2226, YANG-2227, YANG-2228, YANG-2229, YANG-2230, YANG-2231, YANG-2232, YANG-2233, YANG-2234, YANG-2235, YANG-2236, YANG-2237, YANG-2238, YANG-2239, YANG-2240, YANG-2241, YANG-2242, YANG-2243, YANG-2244, YANG-2245, YANG-2246, YANG-2247, YANG-2248, YANG-2249, YANG-2250, YANG-2251, YANG-2252, YANG-2253, YANG-2254, YANG-2255, YANG-2256, YANG-2257, YANG-2258, YANG-2259, YANG-2260, YANG-2261, YANG-2262, YANG-2263, YANG-2264, YANG-2265, YANG-2266, YANG-2267, YANG-2268, YANG-2269, YANG-2270, YANG-2271, YANG-2272, YANG-2273, YANG-2274, YANG-2275, YANG-2276, YANG-2277, YANG-2278, YANG-2279, YANG-2280, YANG-2281, YANG-2282, YANG-2283, YANG-2284, YANG-2285, YANG-2286, YANG-2287, YANG-2288, YANG-2289, YANG-2290, YANG-2291, YANG-2292, YANG-2293, YANG-2294, YANG-2295, YANG-2296, YANG-2297, YANG-2298, YANG-2299, YANG-2299a, YANG-2299b, YANG-2299c, YANG-2299d, YANG-2299e, YANG-2299f, YANG-2299g, YANG-2299h, YANG-2299i, YANG-2299j, YANG-2299k, YANG-22991, optionally with 1, 2, 3, 4 or 5 amino acid alterations outside the complementarity determining regions (CDRs) in the variable heavy (VH) domain sequence and optionally with 1, 2, 3, 4 or 5 amino acid alterations outside the complementarity determining regions (CDRs) in the variable light (VL) domain sequence.

[0745] In one embodiment, the antibody comprises a variable heavy (VH) domain sequence and a variable light (VL) domain sequence and wherein the variable heavy (VH) domain and variable light (VL) domain sequences respectively comprise the variable heavy (VH) domain and variable light (VL) domain sequences of antibody YANG-2203, YANG-2204, YANG-2205, YANG-2206, YANG-2207, or YANG-2208, optionally with 1, 2, 3, 4 or 5 amino acid alterations outside the complementarity determining regions (CDRs) in the variable heavy (VH) domain sequence and optionally with 1, 2, 3, 4 or 5 amino acid alterations outside the complementarity determining regions (CDRs) in the variable light (VL) domain sequence.

[0746] In one embodiment, the antibody comprises a variable heavy (VH) domain sequence of antibody YANG-1201, optionally with 1, 2, 3, 4 or 5 amino acid alterations outside the complementarity determining regions (CDRs), and a variable light (VL) domain sequence of antibody YANG-1201, optionally with 1, 2, 3, 4 or 5 amino acid alterations outside the complementarity determining regions (CDRs).

[0747] In one embodiment, the antibody comprises a variable heavy (VH) domain sequence of antibody YANG-1202, optionally with 1, 2, 3, 4 or 5 amino acid alterations outside the complementarity determining regions (CDRs), and a variable light (VL) domain sequence of antibody YANG-1202, optionally with 1, 2, 3, 4 or 5 amino acid alterations outside the complementarity determining regions (CDRs).

[0748] In one embodiment, the antibody comprises a variable heavy (VH) domain sequence of antibody YANG-1203, optionally with 1, 2, 3, 4 or 5 amino acid alterations outside the complementarity determining regions (CDRs), and a variable light (VL) domain sequence of antibody YANG-1203, optionally with 1, 2, 3, 4 or 5 amino acid alterations outside the complementarity determining regions (CDRs).

[0749] In one embodiment, the antibody comprises a variable heavy (VH) domain sequence of antibody YANG-1204, optionally with 1, 2, 3, 4 or 5 amino acid alterations outside the complementarity determining regions (CDRs), and a variable light (VL) domain sequence of antibody YANG-1204, optionally with 1, 2, 3, 4 or 5 amino acid alterations outside the complementarity determining regions (CDRs).

[0750] In one embodiment, the antibody comprises a variable heavy (VH) domain sequence of antibody YANG-1205, optionally with 1, 2, 3, 4 or 5 amino acid alterations outside the complementarity determining regions (CDRs), and a variable light (VL) domain sequence of antibody YANG-1205, optionally with 1, 2, 3, 4 or 5 amino acid alterations outside the complementarity determining regions (CDRs).

[0751] In one embodiment, the antibody comprises a variable heavy (VH) domain sequence of antibody YANG-1206, optionally with 1, 2, 3, 4 or 5 amino acid alterations outside the complementarity determining regions (CDRs), and a variable light (VL) domain sequence of antibody YANG-1206, optionally with 1, 2, 3, 4 or 5 amino acid alterations outside the complementarity determining regions (CDRs).

[0752] In one embodiment, the antibody comprises a variable heavy (VH) domain sequence of antibody YANG-1207, optionally with 1, 2, 3, 4 or 5 amino acid alterations outside the complementarity determining regions (CDRs), and a variable light (VL) domain sequence of antibody YANG-1207, optionally with 1, 2, 3, 4 or 5 amino acid alterations outside the complementarity determining regions (CDRs).

[0753] In one embodiment, the antibody comprises a variable heavy (VH) domain sequence of antibody YANG-2201, optionally with 1, 2, 3, 4 or 5 amino acid alterations outside the complementarity determining regions (CDRs), and a variable light (VL) domain sequence of antibody YANG-2201, optionally with 1, 2, 3, 4 or 5 amino acid alterations outside the complementarity determining regions (CDRs).

[0754] In one embodiment, the antibody comprises a variable heavy (VH) domain sequence of antibody YANG-2202, optionally with 1, 2, 3, 4 or 5 amino acid alterations outside the complementarity determining regions (CDRs), and a variable light (VL) domain sequence of antibody YANG-2202, optionally with 1, 2, 3, 4 or 5 amino acid alterations outside the complementarity determining regions (CDRs).

[0755] In one embodiment, the antibody comprises a variable heavy (VH) domain sequence of antibody YANG-2203, optionally with 1, 2, 3, 4 or 5 amino acid alterations outside the complementarity determining regions (CDRs), and a variable light (VL) domain sequence of antibody YANG-2203, optionally with 1, 2, 3, 4 or 5 amino acid alterations outside the complementarity determining regions (CDRs).

[0756] In one embodiment, the antibody comprises a variable heavy (VH) domain sequence of antibody YANG-2204, optionally with 1, 2, 3, 4 or 5 amino acid alterations outside the complementarity determining regions (CDRs), and a variable light (VL) domain sequence of antibody YANG-2204, optionally with 1, 2, 3, 4 or 5 amino acid alterations outside the complementarity determining regions (CDRs).

[0757] In one embodiment, the antibody comprises a variable heavy (VH) domain sequence of antibody YANG-2205, optionally with 1, 2, 3, 4 or 5 amino acid alterations outside the complementarity determining regions (CDRs), and a variable light (VL) domain sequence of antibody YANG-2205, optionally with 1, 2, 3, 4 or 5 amino acid alterations outside the complementarity determining regions (CDRs).

[0758] In one embodiment, the antibody comprises a variable heavy (VH) domain sequence of antibody YANG-2206, optionally with 1, 2, 3, 4 or 5 amino acid alterations outside the complementarity determining regions (CDRs), and a variable light (VL) domain sequence of antibody YANG-2206, optionally with 1, 2, 3, 4 or 5 amino acid alterations outside the complementarity determining regions (CDRs).

[0759] In one embodiment, the antibody comprises a variable heavy (VH) domain sequence of antibody YANG-2207, optionally with 1, 2, 3, 4 or 5 amino acid alterations outside the complementarity determining regions (CDRs), and a variable light (VL) domain sequence of antibody YANG-2207, optionally with 1, 2, 3, 4 or 5 amino acid alterations outside the complementarity determining regions (CDRs).

[0760] In one embodiment, the antibody comprises a variable heavy (VH) domain sequence of antibody YANG-2208, optionally with 1, 2, 3, 4 or 5 amino acid alterations outside the complementarity determining regions (CDRs), and a variable light (VL) domain sequence of antibody YANG-2208, optionally with 1, 2, 3, 4 or 5 amino acid alterations outside the complementarity determining regions (CDRs).

[0761] In one embodiment, the antibody specifically binds the S2 subunit of the SARS-CoV-2 spike protein with a KD of 0.1 nM or lower (e.g. as measured by surface plasmon resonance (SPR)), and the variable heavy (VH) domain and variable light (VL) domain sequences respectively comprise the variable heavy (VH) domain and variable light (VL) domain sequences of antibody YANG-1201, YANG-1202, YANG-1203, YANG-1204, YANG-1205, YANG-1206, YANG-1207, YANG-2201, YANG-2202, YANG-2203, YANG-2204, YANG-2205, YANG-2206, YANG-2207, or YANG-2208, YANG-2209, YANG-2210, YANG-2211, YANG-2212, YANG-2213, YANG-2214, YANG-2215, YANG-2216, YANG-2217, YANG-2218, YANG-2219, YANG-2220, YANG-2221, YANG-2222, YANG-2223, YANG-2224, YANG-2225, YANG-2226, YANG-2227, YANG-2228, YANG-2229, YANG-2230, YANG-2231, YANG-2232, YANG-2233, YANG-2234, YANG-2235, YANG-2236, YANG-2237, YANG-2238, YANG-2239, YANG-2240, YANG-2241, YANG-2242, YANG-2243, YANG-2244, YANG-2245, YANG-2246, YANG-2247, YANG-2248, YANG-2249, YANG-2250, YANG-2251, YANG-2252, YANG-2253, YANG-2254, YANG-2255, YANG-2256, YANG-2257, YANG-2258, YANG-2259, YANG-2260, YANG-2261, YANG-2262, YANG-2263, YANG-2264, YANG-2265, YANG-2266, YANG-2267, YANG-2268, YANG-2269, YANG-2270, YANG-2271, YANG-2272, YANG-2273, YANG-2274, YANG-2275, YANG-2276, YANG-2277, YANG-2278, YANG-2279, YANG-2280, YANG-2281, YANG-2282, YANG-2283, YANG-2284, YANG-2285, YANG-2286, YANG-2287, YANG-2288, YANG-2289, YANG-2290, YANG-2291, YANG-2292, YANG-2293, YANG-2294, YANG-2295, YANG-2296, YANG-2297, YANG-2298, YANG-2299, YANG-2299a, YANG-2299b, YANG-2299c, YANG-2299d, YANG-2299e, YANG-2299f, YANG-2299g, YANG-2299h, YANG-2299i, YANG-2299j, YANG-2299k, YANG-22991, optionally with 1, 2, 3, 4 or 5 amino acid alterations outside the complementarity determining regions (CDRs) in the variable heavy (VH) domain sequence and optionally with 1, 2, 3, 4 or 5 amino acid alterations outside the complementarity determining regions (CDRs) in the variable light (VL) domain sequence.

[0762] In one embodiment, the antibody specifically binds the S2 subunit of the SARS-CoV-2 spike protein with a KD of 0.1 nM or lower (e.g. as measured by surface plasmon resonance (SPR)), and the variable heavy (VH) domain and variable light (VL) domain sequences respectively comprise the variable heavy (VH) domain and variable light (VL) domain sequences of antibody YANG-2203, YANG-2204, YANG-2205, YANG-2206, YANG-2207, or YANG-2208, optionally with 1, 2, 3, 4 or 5 amino acid alterations outside the complementarity determining regions (CDRs) in the variable heavy (VH) domain sequence and optionally with 1, 2, 3, 4 or 5 amino acid alterations outside the complementarity determining regions (CDRs) in the variable light (VL) domain sequence.

[0763] In one embodiment, the antibody specifically binds to the S2 subunit of the SARS-CoV-2 spike protein and neutralises SARS-CoV-2 with at least 35% neutralisation (e.g. as measured in a pseudovirus neutralisation assay), and the variable heavy (VH) domain and variable light (VL) domain sequences respectively comprise the variable heavy (VH) domain and variable light (VL) domain sequences of antibody YANG-2203, YANG-2204, YANG-2205, YANG-2206, YANG-2207, or YANG-2208, optionally with 1, 2, 3, 4 or 5 amino acid alterations outside the complementarity determining regions (CDRs) in the variable heavy (VH) domain sequence and optionally with 1, 2, 3, 4 or 5 amino acid alterations outside the complementarity determining regions (CDRs) in the variable light (VL) domain sequence.

[0764] In one embodiment, the antibody specifically binds to the S2 subunit of the SARS-CoV-2 spike protein with a KD of 0.1 nM or lower (e.g. as measured by surface plasmon resonance (SPR)) and neutralises SARS-CoV-2 with at least 35% neutralisation (e.g. as measured in a pseudovirus neutralisation assay), and the variable heavy (VH) domain and variable light (VL) domain sequences respectively comprise the variable heavy (VH) domain and variable light (VL) domain sequences of antibody YANG-2203, YANG-2204, YANG-2205, YANG-2206, YANG-2207, or YANG-2208, optionally with 1, 2, 3, 4 or 5 amino acid alterations outside the complementarity determining regions (CDRs) in the variable heavy (VH) domain sequence and optionally with 1, 2, 3, 4 or 5 amino acid alterations outside the complementarity determining regions (CDRs) in the variable light (VL) domain sequence.

[0765] In one embodiment, the antibody comprises a variable heavy (VH) domain sequence and a variable light (VL) domain sequence and wherein the variable heavy (VH) domain and variable light (VL) domain sequences respectively comprise a sequence having at least 90% identity to the variable heavy (VH) and variable light (VL) domain sequences of antibody YANG-1201, YANG-1202, YANG-1203, YANG-1204, YANG-1205, YANG-1206, YANG-1207, YANG-2201, YANG-2202, YANG-2203, YANG-2203a, YANG-2203b, YANG-2203c, YANG-2203d, YANG-2203e, YANG-2203f, YANG-2203g, YANG-2203h, YANG-2203i, YANG-2203j, YANG-2203k, YANG-2204, YANG-2205, YANG-2206, YANG-2207, or YANG-2208, YANG-2209, YANG-2210, YANG-2211, YANG-2212, YANG-2213, YANG-2214, YANG-2215, YANG-2216, YANG-2217, YANG-2218, YANG-2219, YANG-2220, YANG-2221, YANG-2222, YANG-2223, YANG-2224, YANG-2225, YANG-2226, YANG-2227, YANG-2228, YANG-2229, YANG-2230, YANG-2231, YANG-2232, YANG-2233, YANG-2234, YANG-2235, YANG-2236, YANG-2237, YANG-2238, YANG-2239, YANG-2240, YANG-2241, YANG-2242, YANG-2243, YANG-2244, YANG-2245, YANG-2246, YANG-2247, YANG-2248, YANG-2249, YANG-2250, YANG-2251, YANG-2252, YANG-2253, YANG-2254, YANG-2255, YANG-2256, YANG-2257, YANG-2258, YANG-2259, YANG-2260, YANG-2261, YANG-2262, YANG-2263, YANG-2264, YANG-2265, YANG-2266, YANG-2267, YANG-2268, YANG-2269, YANG-2270, YANG-2271, YANG-2272, YANG-2273, YANG-2274, YANG-2275, YANG-2276, YANG-2277, YANG-2278, YANG-2279, YANG-2280, YANG-2281, YANG-2282, YANG-2283, YANG-2284, YANG-2285, YANG-2286, YANG-2287, YANG-2288, YANG-2289, YANG-2290, YANG-2291, YANG-2292, YANG-2293, YANG-2294, YANG-2295, YANG-2296, YANG-2297, YANG-2298, YANG-2299, YANG-2299a, YANG-2299b, YANG-2299c, YANG-2299d, YANG-2299e, YANG-2299f, YANG-2299g, YANG-2299h, YANG-2299i, YANG-2299j, YANG-2299k, YANG-22991, provided that the antibody has the CDRs of antibody YANG-1201, YANG-1202, YANG-1203, YANG-1204, YANG-1205, YANG-1206, YANG-1207, YANG-2201, YANG-2202, YANG-2203, YANG-2203a, YANG-2203b, YANG-2203c, YANG-2203d, YANG-2203e, YANG-2203f, YANG-2203g, YANG-2203h, YANG-2203i, YANG-2203j, YANG-2203k, YANG-2204, YANG-2205, YANG-2206, YANG-2207, or YANG-2208, YANG-2209, YANG-2210, YANG-2211, YANG-2212, YANG-2213, YANG-2214, YANG-2215, YANG-2216, YANG-2217, YANG-2218, YANG-2219, YANG-2220, YANG-2221, YANG-2222, YANG-2223, YANG-2224, YANG-2225, YANG-2226, YANG-2227, YANG-2228, YANG-2229, YANG-2230, YANG-2231, YANG-2232, YANG-2233, YANG-2234, YANG-2235, YANG-2236, YANG-2237, YANG-2238, YANG-2239, YANG-2240, YANG-2241, YANG-2242, YANG-2243, YANG-2244, YANG-2245, YANG-2246, YANG-2247, YANG-2248, YANG-2249, YANG-2250, YANG-2251, YANG-2252, YANG-2253, YANG-2254, YANG-2255, YANG-2256, YANG-2257, YANG-2258, YANG-2259, YANG-2260, YANG-2261, YANG-2262, YANG-2263, YANG-2264, YANG-2265, YANG-2266, YANG-2267, YANG-2268, YANG-2269, YANG-2270, YANG-2271, YANG-2272, YANG-2273, YANG-2274, YANG-2275, YANG-2276, YANG-2277, YANG-2278, YANG-2279, YANG-2280, YANG-2281, YANG-2282, YANG-2283, YANG-2284, YANG-2285, YANG-2286, YANG-2287, YANG-2288, YANG-2289, YANG-2290, YANG-2291, YANG-2292, YANG-2293, YANG-2294, YANG-2295, YANG-2296, YANG-2297, YANG-2298, YANG-2299, YANG-2299a, YANG-2299b, YANG-2299c, YANG-2299d, YANG-2299e, YANG-2299f, YANG-2299g, YANG-2299h, YANG-2299i, YANG-2299j, YANG-2299k, YANG-22991, respectively.

[0766] In one embodiment, the antibody comprises a variable heavy (VH) domain sequence and a variable light (VL) domain sequence and wherein the variable heavy (VH) domain and variable light (VL) domain sequences respectively comprise a sequence having at least 90% identity to the variable heavy (VH) and variable light (VL) domain sequences of antibody YANG-2203, YANG-2204, YANG-2205, YANG-2206, YANG-2207, or YANG-2208, provided that the antibody has the CDRs of antibody YANG-2203, YANG-2204, YANG-2205, YANG-2206, YANG-2207, or YANG-2208, respectively.

[0767] In one embodiment, the variable heavy (VH) domain sequence comprises a sequence having at least 90% identity to the VH domain sequence of antibody YANG-1201 and the variable light (VL) domain sequence comprises a sequence having at least 90% identity to the VL domain sequence of antibody YANG-1201, provided that the antibody has the CDRs of antibody YANG-1201.

[0768] In one embodiment, the variable heavy (VH) domain sequence comprises a sequence having at least 90% identity to the VH domain sequence of antibody YANG-1202 and the variable light (VL) domain sequence comprises a sequence having at least 90% identity to the VL domain sequence of antibody YANG-1202, provided that the antibody has the CDRs of antibody YANG-1202.

[0769] In one embodiment, the variable heavy (VH) domain sequence comprises a sequence having at least 90% identity to the VH domain sequence of antibody YANG-1203 and the variable light (VL) domain sequence comprises a sequence having at least 90% identity to the VL domain sequence of antibody YANG-1203, provided that the antibody has the CDRs of antibody YANG-1203.

[0770] In one embodiment, the variable heavy (VH) domain sequence comprises a sequence having at least 90% identity to the VH domain sequence of antibody YANG-1204 and the variable light (VL) domain sequence comprises a sequence having at least 90% identity to the VL domain sequence of antibody YANG-1204, provided that the antibody has the CDRs of antibody YANG-1204.

[0771] In one embodiment, the variable heavy (VH) domain sequence comprises a sequence having at least 90% identity to the VH domain sequence of antibody YANG-1205 and the variable light (VL) domain sequence comprises a sequence having at least 90% identity to the VL domain sequence of antibody YANG-1205, provided that the antibody has the CDRs of antibody YANG-1205.

[0772] In one embodiment, the variable heavy (VH) domain sequence comprises a sequence having at least 90% identity to the VH domain sequence of antibody YANG-1206 and the variable light (VL) domain sequence comprises a sequence having at least 90% identity to the VL domain sequence of antibody YANG-1206, provided that the antibody has the CDRs of antibody YANG-1206.

[0773] In one embodiment, the variable heavy (VH) domain sequence comprises a sequence having at least 90% identity to the VH domain sequence of antibody YANG-1207 and the variable light (VL) domain sequence comprises a sequence having at least 90% identity to the VL domain sequence of antibody YANG-1207, provided that the antibody has the CDRs of antibody YANG-1207.

[0774] In one embodiment, the variable heavy (VH) domain sequence comprises a sequence having at least 90% identity to the VH domain sequence of antibody YANG-2201 and the variable light (VL) domain sequence comprises a sequence having at least 90% identity to the VL domain sequence of antibody YANG-2201, provided that the antibody has the CDRs of antibody YANG-2201.

[0775] In one embodiment, the variable heavy (VH) domain sequence comprises a sequence having at least 90% identity to the VH domain sequence of antibody YANG-2202 and the variable light (VL) domain sequence comprises a sequence having at least 90% identity to the VL domain sequence of antibody YANG-2202, provided that the antibody has the CDRs of antibody YANG-2202.

[0776] In one embodiment, the variable heavy (VH) domain sequence comprises a sequence having at least 90% identity to the VH domain sequence of antibody YANG-2203 and the variable light (VL) domain sequence comprises a sequence having at least 90% identity to the VL domain sequence of antibody YANG-2203, provided that the antibody has the CDRs of antibody YANG-2203.

[0777] In one embodiment, the variable heavy (VH) domain sequence comprises a sequence having at least 90% identity to the VH domain sequence of antibody YANG-2204 and the variable light (VL) domain sequence comprises a sequence having at least 90% identity to the VL domain sequence of antibody YANG-2204, provided that the antibody has the CDRs of antibody YANG-2204.

[0778] In one embodiment, the variable heavy (VH) domain sequence comprises a sequence having at least 90% identity to the VH domain sequence of antibody YANG-2205 and the variable light (VL) domain sequence comprises a sequence having at least 90% identity to the VL domain sequence of antibody YANG-2205, provided that the antibody has the CDRs of antibody YANG-2205.

[0779] In one embodiment, the variable heavy (VH) domain sequence comprises a sequence having at least 90% identity to the VH domain sequence of antibody YANG-2206 and the variable light (VL) domain sequence comprises a sequence having at least 90% identity to the VL domain sequence of antibody YANG-2206, provided that the antibody has the CDRs of antibody YANG-2206.

[0780] In one embodiment, the variable heavy (VH) domain sequence comprises a sequence having at least 90% identity to the VH domain sequence of antibody YANG-2207 and the variable light (VL) domain sequence comprises a sequence having at least 90% identity to the VL domain sequence of antibody YANG-2207, provided that the antibody has the CDRs of antibody YANG-2207.

[0781] In one embodiment, the variable heavy (VH) domain sequence comprises a sequence having at least 90% identity to the VH domain sequence of antibody YANG-2208 and the variable light (VL) domain sequence comprises a sequence having at least 90% identity to the VL domain sequence of antibody YANG-2208, provided that the antibody has the CDRs of antibody YANG-2208.

[0782] In one embodiment, the antibody specifically binds the S2 subunit of the SARS-CoV-2 spike protein with a KD of 0.1 nM or lower (e.g. as measured by surface plasmon resonance (SPR)), and the antibody comprises a variable heavy (VH) domain sequence and a variable light (VL) domain sequence and wherein the variable heavy (VH) domain and variable light (VL) domain sequences respectively comprise a sequence having at least 90% identity to the variable heavy (VH) and variable light (VL) domain sequences of antibody YANG-1201, YANG-1202, YANG-1203, YANG-1204, YANG-1205, YANG-1206, YANG-1207, YANG-2201, YANG-2202, YANG-2203, YANG-2203a, YANG-2203b, YANG-2203c, YANG-2203d, YANG-2203e, YANG-2203f, YANG-2203g, YANG-2203h, YANG-2203i, YANG-2203j, YANG-2203k, YANG-2204, YANG-2205, YANG-2206, YANG-2207, or YANG-2208, YANG-2209, YANG-2210, YANG-2211, YANG-2212, YANG-2213, YANG-2214, YANG-2215, YANG-2216, YANG-2217, YANG-2218, YANG-2219, YANG-2220, YANG-2221, YANG-2222, YANG-2223, YANG-2224, YANG-2225, YANG-2226, YANG-2227, YANG-2228, YANG-2229, YANG-2230, YANG-2231, YANG-2232, YANG-2233, YANG-2234, YANG-2235, YANG-2236, YANG-2237, YANG-2238, YANG-2239, YANG-2240, YANG-2241, YANG-2242, YANG-2243, YANG-2244, YANG-2245, YANG-2246, YANG-2247, YANG-2248, YANG-2249, YANG-2250, YANG-2251, YANG-2252, YANG-2253, YANG-2254, YANG-2255, YANG-2256, YANG-2257, YANG-2258, YANG-2259, YANG-2260, YANG-2261, YANG-2262, YANG-2263, YANG-2264, YANG-2265, YANG-2266, YANG-2267, YANG-2268, YANG-2269, YANG-2270, YANG-2271, YANG-2272, YANG-2273, YANG-2274, YANG-2275, YANG-2276, YANG-2277, YANG-2278, YANG-2279, YANG-2280, YANG-2281, YANG-2282, YANG-2283, YANG-2284, YANG-2285, YANG-2286, YANG-2287, YANG-2288, YANG-2289, YANG-2290, YANG-2291, YANG-2292, YANG-2293, YANG-2294, YANG-2295, YANG-2296, YANG-2297, YANG-2298, YANG-2299, YANG-2299a, YANG-2299b, YANG-2299c, YANG-2299d, YANG-2299e, YANG-2299f, YANG-2299g, YANG-2299h, YANG-2299i, YANG-2299j, YANG-2299k, YANG-22991, provided that the antibody has the CDRs of antibody YANG-1201, YANG-1202, YANG-1203, YANG-1204, YANG-1205, YANG-1206, YANG-1207, YANG-2201, YANG-2202, YANG-2203, YANG-2203a, YANG-2203b, YANG-2203c, YANG-2203d, YANG-2203e, YANG-2203f, YANG-2203g, YANG-2203h, YANG-2203i, YANG-2203j, YANG-2203k, YANG-2204, YANG-2205, YANG-2206, YANG-2207, or YANG-2208, YANG-2209, YANG-2210, YANG-2211, YANG-2212, YANG-2213, YANG-2214, YANG-2215, YANG-2216, YANG-2217, YANG-2218, YANG-2219, YANG-2220, YANG-2221, YANG-2222, YANG-2223, YANG-2224, YANG-2225, YANG-2226, YANG-2227, YANG-2228, YANG-2229, YANG-2230, YANG-2231, YANG-2232, YANG-2233, YANG-2234, YANG-2235, YANG-2236, YANG-2237, YANG-2238, YANG-2239, YANG-2240, YANG-2241, YANG-2242, YANG-2243, YANG-2244, YANG-2245, YANG-2246, YANG-2247, YANG-2248, YANG-2249, YANG-2250, YANG-2251, YANG-2252, YANG-2253, YANG-2254, YANG-2255, YANG-2256, YANG-2257, YANG-2258, YANG-2259, YANG-2260, YANG-2261, YANG-2262, YANG-2263, YANG-2264, YANG-2265, YANG-2266, YANG-2267, YANG-2268, YANG-2269, YANG-2270, YANG-2271, YANG-2272, YANG-2273, YANG-2274, YANG-2275, YANG-2276, YANG-2277, YANG-2278, YANG-2279, YANG-2280, YANG-2281, YANG-2282, YANG-2283, YANG-2284, YANG-2285, YANG-2286, YANG-2287, YANG-2288, YANG-2289, YANG-2290, YANG-2291, YANG-2292, YANG-2293, YANG-2294, YANG-2295, YANG-2296, YANG-2297, YANG-2298, YANG-2299, YANG-2299a, YANG-2299b, YANG-2299c, YANG-2299d, YANG-2299e, YANG-2299f, YANG-2299g, YANG-2299h, YANG-2299i, YANG-2299j, YANG-2299k, YANG-22991, respectively.

[0783] In one embodiment, the antibody specifically binds the S2 subunit of the SARS-CoV-2 spike protein with a KD of 0.1 nM or lower (e.g. as measured by surface plasmon resonance (SPR)), and the antibody comprises a variable heavy (VH) domain sequence and a variable light (VL) domain sequence and wherein the variable heavy (VH) domain and variable light (VL) domain sequences respectively comprise a sequence having at least 90% identity to the variable heavy (VH) and variable light (VL) domain sequences of antibody YANG-2203, YANG-2204, YANG-2205, YANG-2206, YANG-2207, or YANG-2208, provided that the antibody has the CDRs of antibody YANG-2203, YANG-2204, YANG-2205, YANG-2206, YANG-2207, or YANG-2208, respectively.

[0784] In one embodiment, the antibody specifically binds to the S2 subunit of the SARS-CoV-2 spike protein and neutralises SARS-CoV-2 with at least 35% neutralisation (e.g. as measured in a pseudovirus neutralisation assay), and the antibody comprises a variable heavy (VH) domain sequence and a variable light (VL) domain sequence and wherein the variable heavy (VH) domain and variable light (VL) domain sequences respectively comprise a sequence having at least 90% identity to the variable heavy (VH) and variable light (VL) domain sequences of antibody YANG-2203, YANG-2204, YANG-2205, YANG-2206, YANG-2207, or YANG-2208, provided that the antibody has the CDRs of antibody YANG-2203, YANG-2204, YANG-2205, YANG-2206, YANG-2207, or YANG-2208, respectively.

[0785] In one embodiment, the antibody specifically binds to the S2 subunit of the SARS-CoV-2 spike protein with a KD of 0.1 nM or lower (e.g. as measured by surface plasmon resonance (SPR)) and neutralises SARS-CoV-2 with at least 35% neutralisation (e.g. as measured in a pseudovirus neutralisation assay), and the antibody comprises a variable heavy (VH) domain sequence and a variable light (VL) domain sequence and wherein the variable heavy (VH) domain and variable light (VL) domain sequences respectively comprise a sequence having at least 90% identity to the variable heavy (VH) and variable light (VL) domain sequences of antibody YANG-2203, YANG-2204, YANG-2205, YANG-2206, YANG-2207, or YANG-2208, provided that the antibody has the CDRs of antibody YANG-2203, YANG-2204, YANG-2205, YANG-2206, YANG-2207, or YANG-2208, respectively.

[0786] In one embodiment, the present invention provides an antibody that specifically binds to the S2 subunit of the SARS-CoV-2 spike protein, wherein the antibody comprises a variable heavy (VH) domain sequence and a variable light (VL) domain sequence and wherein the variable heavy (VH) domain and variable light (VL) domain sequences respectively comprise the variable heavy (VH) and variable light (VL) domain sequences of antibody YANG-1201, YANG-1202, YANG-1203, YANG-1204, YANG-1205, YANG-1206, YANG-1207, YANG-2201, YANG-2202, YANG-2203, YANG-2203a, YANG-2203b, YANG-2203c, YANG-2203d, YANG-2203e, YANG-2203f, YANG-2203g, YANG-2203h, YANG-2203i, YANG-2203j, YANG-2203k, YANG-2204, YANG-2205, YANG-2206, YANG-2207, or YANG-2208.

[0787] In one embodiment, the present invention provides an antibody that specifically binds to the S2 subunit of the SARS-CoV-2 spike protein, wherein the antibody comprises a variable heavy (VH) domain sequence and a variable light (VL) domain sequence and wherein the variable heavy (VH) domain and variable light (VL) domain sequences respectively comprise the variable heavy (VH) and variable light (VL) domain sequences of antibody YANG-2203, YANG-2204, YANG-2205, YANG-2206, YANG-2207, or YANG-2208.

[0788] An antibody that specifically binds to the S2 subunit of the SARS-CoV-2 spike protein, wherein the antibody comprises the VH and VL domain sequences of antibody YANG-1201.

[0789] An antibody that specifically binds to the S2 subunit of the SARS-CoV-2 spike protein, wherein the antibody comprises the VH and VL domain sequences of antibody YANG-1202.

[0790] An antibody that specifically binds to the S2 subunit of the SARS-CoV-2 spike protein, wherein the antibody comprises the VH and VL domain sequences of antibody YANG-1203.

[0791] An antibody that specifically binds to the S2 subunit of the SARS-CoV-2 spike protein, wherein the antibody comprises the VH and VL domain sequences of antibody YANG-1204.

[0792] An antibody that specifically binds to the S2 subunit of the SARS-CoV-2 spike protein, wherein the antibody comprises the VH and VL domain sequences of antibody YANG-1205.

[0793] An antibody that specifically binds to the S2 subunit of the SARS-CoV-2 spike protein, wherein the antibody comprises the VH and VL domain sequences of antibody YANG-1206.

[0794] An antibody that specifically binds to the S2 subunit of the SARS-CoV-2 spike protein, wherein the antibody comprises the VH and VL domain sequences of antibody YANG-1207.

[0795] An antibody that specifically binds to the S2 subunit of the SARS-CoV-2 spike protein, wherein the antibody comprises the VH and VL domain sequences of antibody YANG-2201.

[0796] An antibody that specifically binds to the S2 subunit of the SARS-CoV-2 spike protein, wherein the antibody comprises the VH and VL domain sequences of antibody YANG-2202.

[0797] An antibody that specifically binds to the S2 subunit of the SARS-CoV-2 spike protein, wherein the antibody comprises the VH and VL domain sequences of antibody YANG-2203.

[0798] An antibody that specifically binds to the S2 subunit of the SARS-CoV-2 spike protein, wherein the antibody comprises the VH and VL domain sequences of antibody YANG-2204.

[0799] An antibody that specifically binds to the S2 subunit of the SARS-CoV-2 spike protein, wherein the antibody comprises the VH and VL domain sequences of antibody YANG-2205.

[0800] An antibody that specifically binds to the S2 subunit of the SARS-CoV-2 spike protein, wherein the antibody comprises the VH and VL domain sequences of antibody YANG-2206.

[0801] An antibody that specifically binds to the S2 subunit of the SARS-CoV-2 spike protein, wherein the antibody comprises the VH and VL domain sequences of antibody YANG-2207.

[0802] An antibody that specifically binds to the S2 subunit of the SARS-CoV-2 spike protein, wherein the antibody comprises the VH and VL domain sequences of antibody YANG-2208.

[0803] In one embodiment, the antibody comprises a variable heavy (VH) domain sequence and a variable light (VL) domain sequence and wherein the variable heavy (VH) domain and variable light (VL) domain sequences respectively comprise the variable heavy (VH) and variable light (VL) domain sequences of antibody YANG-1201, YANG-1202, YANG-1203, YANG-1204, YANG-1205, YANG-1206, YANG-1207, YANG-2201, YANG-2202, YANG-2203, YANG-2203a, YANG-2203b, YANG-2203c, YANG-2203d, YANG-2203e, YANG-2203f, YANG-2203g, YANG-2203h, YANG-2203i, YANG-2203j, YANG-2203k, YANG-2204, YANG-2205, YANG-2206, YANG-2207, or YANG-2208.

[0804] In one embodiment, the antibody comprises a variable heavy (VH) domain sequence and a variable light (VL) domain sequence and wherein the variable heavy (VH) domain and variable light (VL) domain sequences respectively comprise the variable heavy (VH) and variable light (VL) domain sequences of antibody YANG-2203, YANG-2204, YANG-2205, YANG-2206, YANG-2207, or YANG-2208.

[0805] In one embodiment, the antibody comprises the VH and VL domain sequences of antibody YANG-1201.

[0806] In one embodiment, the antibody comprises the VH and VL domain sequences of antibody YANG-1202.

[0807] In one embodiment, the antibody comprises the VH and VL domain sequences of antibody YANG-1203.

[0808] In one embodiment, the antibody comprises the VH and VL domain sequences of antibody YANG-1204.

[0809] In one embodiment, the antibody comprises the VH and VL domain sequences of antibody YANG-1205.

[0810] In one embodiment, the antibody comprises the VH and VL domain sequences of antibody YANG-1206.

[0811] In one embodiment, the antibody comprises the VH and VL domain sequences of antibody YANG-1207.

[0812] In one embodiment, the antibody comprises the VH and VL domain sequences of antibody YANG-2201.

[0813] In one embodiment, the antibody comprises the VH and VL domain sequences of antibody YANG-2202.

[0814] In one embodiment, the antibody comprises the VH and VL domain sequences of antibody YANG-2203.

[0815] In one embodiment, the antibody comprises the VH and VL domain sequences of antibody YANG-2204.

[0816] In one embodiment, the antibody comprises the VH and VL domain sequences of antibody YANG-2205.

[0817] In one embodiment, the antibody comprises the VH and VL domain sequences of antibody YANG-2206.

[0818] In one embodiment, the antibody comprises the VH and VL domain sequences of antibody YANG-2207.

[0819] In one embodiment, the antibody comprises the VH and VL domain sequences of antibody YANG-2208.

[0820] Antibodies are provided which bind to the same epitope on the S2 subunit of the SARS-CoV-2 spike protein as an antibody described anywhere herein.

[0821] An antibody is provided which bind to the same epitope as antibody YANG-1201, YANG-1202, YANG-1203, YANG-1204, YANG-1205, YANG-1206, YANG-1207, YANG-2201, YANG-2202, YANG-2203, YANG-2203a, YANG-2203b, YANG-2203c, YANG-2203d, YANG-2203e, YANG-2203f, YANG-2203g, YANG-2203h, YANG-2203i, YANG-2203j, YANG-2203k, YANG-2204, YANG-2205, YANG-2206, YANG-2207, or YANG-2208, YANG-2209, YANG-2210, YANG-2211, YANG-2212, YANG-2213, YANG-2214, YANG-2215, YANG-2216, YANG-2217, YANG-2218, YANG-2219, YANG-2220, YANG-2221, YANG-2222, YANG-2223, YANG-2224, YANG-2225, YANG-2226, YANG-2227, YANG-2228, YANG-2229, YANG-2230, YANG-2231, YANG-2232, YANG-2233, YANG-2234, YANG-2235, YANG-2236, YANG-2237, YANG-2238, YANG-2239, YANG-2240, YANG-2241, YANG-2242, YANG-2243, YANG-2244, YANG-2245, YANG-2246, YANG-2247, YANG-2248, YANG-2249, YANG-2250, YANG-2251, YANG-2252, YANG-2253, YANG-2254, YANG-2255, YANG-2256, YANG-2257, YANG-2258, YANG-2259, YANG-2260, YANG-2261, YANG-2262, YANG-2263, YANG-2264, YANG-2265, YANG-2266, YANG-2267, YANG-2268, YANG-2269, YANG-2270, YANG-2271, YANG-2272, YANG-2273, YANG-2274, YANG-2275, YANG-2276, YANG-2277, YANG-2278, YANG-2279, YANG-2280, YANG-2281, YANG-2282, YANG-2283, YANG-2284, YANG-2285, YANG-2286, YANG-2287, YANG-2288, YANG-2289, YANG-2290, YANG-2291, YANG-2292, YANG-2293, YANG-2294, YANG-2295, YANG-2296, YANG-2297, YANG-2298, YANG-2299, YANG-2299a, YANG-2299b, YANG-2299c, YANG-2299d, YANG-2299e, YANG-2299f, YANG-2299g, YANG-2299h, YANG-2299i, YANG-2299j, YANG-2299k, YANG-22991, e.g. as defined by its VH and VL sequences.

[0822] An antibody is provided which bind to the same epitope as antibody YANG-2203, YANG-2204, YANG-2205, YANG-2206, YANG-2207, or YANG-2208, e.g. as defined by its VH and VL sequences.

[0823] In one embodiment, an antibody is provided which binds to the same epitope as antibody YANG-1201.

[0824] In one embodiment, an antibody is provided which binds to the same epitope as antibody YANG-1202.

[0825] In one embodiment, an antibody is provided which binds to the same epitope as antibody YANG-1203.

[0826] In one embodiment, an antibody is provided which binds to the same epitope as antibody YANG-1204.

[0827] In one embodiment, an antibody is provided which binds to the same epitope as antibody YANG-1205.

[0828] In one embodiment, an antibody is provided which binds to the same epitope as antibody YANG-1206.

[0829] In one embodiment, an antibody is provided which binds to the same epitope as antibody YANG-1207.

[0830] In one embodiment, an antibody is provided which binds to the same epitope as antibody YANG-2201.

[0831] In one embodiment, an antibody is provided which binds to the same epitope as antibody YANG-2202.

[0832] In one embodiment, an antibody is provided which binds to the same epitope as antibody YANG-2203.

[0833] In one embodiment, an antibody is provided which binds to the same epitope as antibody YANG-2204.

[0834] In one embodiment, an antibody is provided which binds to the same epitope as antibody YANG-2205.

[0835] In one embodiment, an antibody is provided which binds to the same epitope as antibody YANG-2206.

[0836] In one embodiment, an antibody is provided which binds to the same epitope as antibody YANG-2207.

[0837] In one embodiment, an antibody is provided which binds to the same epitope as antibody YANG-2208.

[0838] An antibody may contact the SARS-CoV-2 spike protein with a footprint that fully or partly overlaps with that of an antibody disclosed anywhere herein. As described elsewhere herein, competition between antibodies may be determined, for example using SPR, and antibodies are provided which compete for binding to the spike protein (compete for binding to their epitope) with an IgG antibody as described anywhere herein.

[0839] An antibody of the present invention may be one which competes for binding to SARS-CoV-2 spike protein with any anti-S2 antibody described herein, such as YANG-1201, YANG-1202, YANG-1203, YANG-1204, YANG-1205, YANG-1206, YANG-1207, YANG-2201, YANG-2202, YANG-2203, YANG-2203a, YANG-2203b, YANG-2203c, YANG-2203d, YANG-2203e, YANG-2203f, YANG-2203g, YANG-2203h, YANG-2203i, YANG-2203j, YANG-2203k, YANG-2204, YANG-2205, YANG-2206, YANG-2207, or YANG-2208, YANG-2209, YANG-2210, YANG-2211, YANG-2212, YANG-2213, YANG-2214, YANG-2215, YANG-2216, YANG-2217, YANG-2218, YANG-2219, YANG-2220, YANG-2221, YANG-2222, YANG-2223, YANG-2224, YANG-2225, YANG-2226, YANG-2227, YANG-2228, YANG-2229, YANG-2230, YANG-2231, YANG-2232, YANG-2233, YANG-2234, YANG-2235, YANG-2236, YANG-2237, YANG-2238, YANG-2239, YANG-2240, YANG-2241, YANG-2242, YANG-2243, YANG-2244, YANG-2245, YANG-2246, YANG-2247, YANG-2248, YANG-2249, YANG-2250, YANG-2251, YANG-2252, YANG-2253, YANG-2254, YANG-2255, YANG-2256, YANG-2257, YANG-2258, YANG-2259, YANG-2260, YANG-2261, YANG-2262, YANG-2263, YANG-2264, YANG-2265, YANG-2266, YANG-2267, YANG-2268, YANG-2269, YANG-2270, YANG-2271, YANG-2272, YANG-2273, YANG-2274, YANG-2275, YANG-2276, YANG-2277, YANG-2278, YANG-2279, YANG-2280, YANG-2281, YANG-2282, YANG-2283, YANG-2284, YANG-2285, YANG-2286, YANG-2287, YANG-2288, YANG-2289, YANG-2290, YANG-2291, YANG-2292, YANG-2293, YANG-2294, YANG-2295, YANG-2296, YANG-2297, YANG-2298, YANG-2299, YANG-2299a, YANG-2299b, YANG-2299c, YANG-2299d, YANG-2299e, YANG-2299f, YANG-2299g, YANG-2299h, YANG-2299i, YANG-2299j, YANG-2299k, YANG-22991, e.g. as defined by its VH and VL sequences.

[0840] An antibody of the present invention may be one which competes for binding to the SARS-CoV-2 spike protein with antibody YANG-1201.

[0841] An antibody of the present invention may be one which competes for binding to the SARS-CoV-2 spike protein with antibody YANG-1202.

[0842] An antibody of the present invention may be one which competes for binding to the SARS-CoV-2 spike protein with antibody YANG-1203.

[0843] An antibody of the present invention may be one which competes for binding to the SARS-CoV-2 spike protein with antibody YANG-1204.

[0844] An antibody of the present invention may be one which competes for binding to the SARS-CoV-2 spike protein with antibody YANG-1205.

[0845] An antibody of the present invention may be one which competes for binding to the SARS-CoV-2 spike protein with antibody YANG-1206.

[0846] An antibody of the present invention may be one which competes for binding to the SARS-CoV-2 spike protein with antibody YANG-1207.

[0847] An antibody of the present invention may be one which competes for binding to the SARS-CoV-2 spike protein with antibody YANG-2201.

[0848] An antibody of the present invention may be one which competes for binding to the SARS-CoV-2 spike protein with antibody YANG-2202.

[0849] An antibody of the present invention may be one which competes for binding to the SARS-CoV-2 spike protein with antibody YANG-2203.

[0850] An antibody of the present invention may be one which competes for binding to the SARS-CoV-2 spike protein with antibody YANG-2204.

[0851] An antibody of the present invention may be one which competes for binding to the SARS-CoV-2 spike protein with antibody YANG-2205.

[0852] An antibody of the present invention may be one which competes for binding to the SARS-CoV-2 spike protein with antibody YANG-2206.

[0853] An antibody of the present invention may be one which competes for binding to the SARS-CoV-2 spike protein with antibody YANG-2207.

[0854] An antibody of the present invention may be one which competes for binding to the SARS-CoV-2 spike protein with antibody YANG-2208.

[0855] In one embodiment, the antibody comprises VH and/or VL domain framework regions of human germline gene segment sequences.

[0856] In one embodiment, the antibody comprises an antibody VH domain which
[0857] i) is derived from recombination of a human heavy chain V gene segment, a human heavy chain D gene segment and a human heavy chain J gene segment, wherein the V gene segment is IGHV4-4*02, IGHV3-7*01, IGHV3-9*01, IGHV3-30*18, IGHV1-46*03, IGHV3-33*01 or IGHV3-23*04; and/or the J gene segment is IGHJ6*02, IGHJ3*02 or IGHJ4*02; or
[0858] ii) comprises framework regions FR1, FR2, FR3 and FR4, wherein FR1 aligns with human germline V gene segment IGHV4-4*02, IGHV3-7*01, IGHV3-9*01, IGHV3-30*18, IGHV1-46*03, IGHV3-33*01 or IGHV3-23*04 with up to 1, 2, 3, 4, or 5 amino acid alterations, FR2 aligns with human germline V gene segment IGHV4-4*02, IGHV3-7*01, IGHV3-9*01, IGHV3-30*18, IGHV1-46*03, IGHV3-33*01 or IGHV3-23*04 with up to 1, 2, 3, 4, or 5 amino acid alterations, FR3 aligns with human germline V gene segment IGHV4-4*02, IGHV3-7*01, IGHV3-9*01, IGHV3-30*18, IGHV1-46*03, IGHV3-33*01 or IGHV3-23*04 with up to 1, 2, 3, 4, or 5 amino acid alterations, and/or FR4 aligns with human germline J gene segment IGHJ6*02, IGHJ3*02 or IGHJ4*02 with up to 1, 2, 3, 4 or 5 amino acid alterations.

[0859] In one embodiment, the antibody comprises an antibody VH domain which
[0860] i) is derived from recombination of a human heavy chain V gene segment IGHV4-4*02, IGHV3-7*01, IGHV3-9*01, IGHV3-30*18, IGHV1-46*03, IGHV3-33*01 or IGHV3-23*04, a human heavy chain D gene segment and a human heavy chain J gene segment, or
[0861] ii) comprises framework regions FR1, FR2, FR3 and FR4, wherein FR1, FR2 and FR3 each align with human germline V segment IGHV4-4*02, IGHV3-7*01, IGHV3-9*01, IGHV3-30*18, IGHV1-46*03, IGHV3-33*01 or IGHV3-23*04 with up to 1, 2, 3, 4 or 5 amino acid alterations.

[0862] In one embodiment, the J gene segment is IGHJ6*02, IGHJ3*02 or IGHJ4*02, or the VH domain framework region FR4 aligns with human germline J gene segment IGHJ6*02, IGHJ3*02 or IGHJ4*02 with 1, 2, 3, 4 or 5 amino acid alterations.

[0863] In one embodiment, the antibody comprises an antibody VL domain which
[0864] i) is derived from recombination of a human light chain V gene segment and a human light chain J gene segment, wherein
[0865] the V gene segment is IGKV3-20*01, IGKV1-16*02, IGKV1-33*01, IGKV2-30*01, IGKV2D-29*01, IGLV1-40*01, IGLV3-1*01, IGKV2D-28*d01, IGKV1-12*01 or IGLV1-51*01; and/or
[0866] the J gene segment is IGKJ1*01, IGKJ3*01, IGKJ4*01, IGLJ3*02, IGLJ2*01 or IGKJ5*01; or
[0867] ii) comprises framework regions FR1, FR2, FR3 and FR4, wherein
[0868] FR1 aligns with human germline V gene segment IGKV3-20*01, IGKV1-16*02, IGKV1-33*01, IGKV2-30*01, IGKV2D-29*01, IGLV1-40*01, IGLV3-1*01, IGKV2D-28*d01, IGKV1-12*01 or IGLV1-51*01 with up to 1, 2, 3, 4, or 5 amino acid alterations,
[0869] FR2 aligns with human germline V gene segment IGKV3-20*01, IGKV1-16*02, IGKV1-33*01, IGKV2-30*01, IGKV2D-29*01, IGLV1-40*01, IGLV3-1*01, IGKV2D-28*d01, IGKV1-12*01 or IGLV1-51*01 with up to 1, 2, 3, 4, or 5 amino acid alterations
[0870] FR3 aligns with human germline V gene segment IGKV3-20*01, IGKV1-16*02, IGKV1-33*01, IGKV2-30*01, IGKV2D-29*01, IGLV1-40*01, IGLV3-1*01, IGKV2D-28*d01, IGKV1-12*01 or IGLV1-51*01 with up to 1, 2, 3, 4 or 5 amino acid alterations, and/or
[0871] FR4 aligns with human germline J gene segment IGKJ1*01, IGKJ3*01, IGKJ4*01, IGLJ3*02, IGLJ2*01 or IGKJ5*01 with up to 1, 2, 3, 4 or 5 amino acid alterations.

[0872] In one embodiment, the antibody comprises an antibody VL domain derived from recombination of a human light chain V gene segment and a human light chain J gene segment, wherein:
[0873] the V gene segment is IGKV3-20*01, IGKV1-16*02, IGKV1-33*01, IGKV2-30*01, IGKV2D-29*01, IGLV1-40*01, IGLV3-1*01, IGKV2D-28*d01, IGKV1-12*01 or IGLV1-51*01, and optionally
[0874] the J gene segment is IGKJ1*01, IGKJ3*01, IGKJ4*01, IGLJ3*02, IGLJ2*01 or IGKJ5*01.

[0875] Example combinations of v and j gene segments for heavy and light chain variable domains are shown in Table 3, and these represent preferred combinations. The heavy and light chain variable domains may optionally be derived from the v and j gene segments identified in Table 3 for any one individual YANG antibody.

### Group D—Non-Competing RBD Binders

[0876] In a fourth aspect, the present invention provides an antibody that specifically binds to the receptor binding domain (RBD) of the SARS-CoV-2 spike protein, wherein the antibody does not compete for binding to the SARS-CoV2 spike protein with the human ACE2 receptor.

[0877] In one embodiment, the antibody is a neutralising antibody.

[0878] In one embodiment, the antibody neutralises SARS-CoV-2 with an IC50 of 55 nM or lower (e.g. as measured in a pseudovirus neutralisation assay).

[0879] In one embodiment, the antibody neutralises SARS-CoV-2 with an IC50 of 35 nM or lower (e.g. as measured in a pseudovirus neutralisation assay).

[0880] In one embodiment, the antibody neutralises SARS-CoV-2 with an IC50 of 15 nM or lower (e.g. as measured in a pseudovirus neutralisation assay).

[0881] In one embodiment, the antibody neutralises SARS-CoV-2 with an IC50 of 10 nM or lower (e.g. as measured in a pseudovirus neutralisation assay).

[0882] In one embodiment, the antibody neutralises SARS-CoV-2 with an IC50 of 3 nM or lower (e.g. as measured in a pseudovirus neutralisation assay).

[0883] In one embodiment, the antibody increases binding between SARS-CoV-2 and the human ACE2 receptor.

[0884] In one embodiment, the antibody comprises a variable heavy (VH) domain sequence comprising complementarity determining regions (CDRs) HCDR1, HCDR2 and HCDR3, and a variable light (VL) domain sequence comprising complementarity determining regions LCDR1, LCDR2 and LCDR3, wherein the HCDR3 is the HCDR3 of antibody IMPI-026, IMPI-034, IMPI-016, IMPI-050, IMPI-049, IMPI-015, IMPI-009, IMPI-011, IMPI-044, IMPI-046, IMPI-051, IMPI-024, IMPI-058, IMPI-043, IMPI-045, IMPI-027, IMPI-018, IMPI-048, IMPI-033, IMPI-014, IMPI-038 or IMPI-068.

[0885] In one embodiment, the antibody is a neutralising antibody and comprises a variable heavy (VH) domain sequence comprising complementarity determining regions (CDRs) HCDR1, HCDR2 and HCDR3, and a variable light (VL) domain sequence comprising complementarity determining regions LCDR1, LCDR2 and LCDR3, wherein the HCDR3 is the HCDR3 of antibody IMPI-024, IMPI-027, IMPI-038 or IMPI-068 or an antibody in the same cluster as one of these antibodies.

[0886] In one embodiment, the antibody is a neutralising antibody and comprises a variable heavy (VH) domain sequence comprising complementarity determining regions (CDRs) HCDR1, HCDR2 and HCDR3, and a variable light (VL) domain sequence comprising complementarity determining regions LCDR1, LCDR2 and LCDR3, wherein the HCDR3 is the HCDR3 of antibody IMPI-024, IMPI-027, IMPI-038 or IMPI-068.

[0887] In one embodiment, the antibody increases binding between SARS-CoV2 and the human ACE2 receptor and comprises a variable heavy (VH) domain sequence comprising complementarity determining regions (CDRs) HCDR1, HCDR2 and HCDR3, and a variable light (VL) domain sequence comprising complementarity determining regions LCDR1, LCDR2 and LCDR3, wherein the HCDR3 is the HCDR3 of antibody IMPI-027, IMPI-033, IMPI-038 or IMPI-068 or an antibody in the same cluster as one of these antibodies.

[0888] In one embodiment, the antibody increases binding between SARS-CoV2 and the human ACE2 receptor and comprises a variable heavy (VH) domain sequence comprising complementarity determining regions (CDRs) HCDR1, HCDR2 and HCDR3, and a variable light (VL) domain sequence comprising complementarity determining regions LCDR1, LCDR2 and LCDR3, wherein the HCDR3 is the HCDR3 of antibody IMPI-027, IMPI-033, IMPI-038 or IMPI-068.

[0889] In one embodiment, HCDR3 is the HCDR3 of antibody IMPI-026.

[0890] In one embodiment, HCDR3 is the HCDR3 of antibody IMPI-034.

[0891] In one embodiment, HCDR3 is the HCDR3 of antibody IMPI-016.

[0892] In one embodiment, HCDR3 is the HCDR3 of antibody IMPI-050.

[0893] In one embodiment, HCDR3 is the HCDR3 of antibody IMPI-049.

[0894] In one embodiment, HCDR3 is the HCDR3 of antibody IMPI-015.

[0895] In one embodiment, HCDR3 is the HCDR3 of antibody IMPI-009.

[0896] In one embodiment, HCDR3 is the HCDR3 of antibody IMPI-011.

[0897] In one embodiment, HCDR3 is the HCDR3 of antibody IMPI-044.

[0898] In one embodiment, HCDR3 is the HCDR3 of antibody IMPI-046.

[0899] In one embodiment, HCDR3 is the HCDR3 of antibody IMPI-051.

[0900] In one embodiment, HCDR3 is the HCDR3 of antibody IMPI-024.

[0901] In one embodiment, HCDR3 is the HCDR3 of antibody IMPI-058.

[0902] In one embodiment, HCDR3 is the HCDR3 of antibody IMPI-043.

[0903] In one embodiment, HCDR3 is the HCDR3 of antibody IMPI-045.

[0904] In one embodiment, HCDR3 is the HCDR3 of antibody IMPI-027.

[0905] In one embodiment, HCDR3 is the HCDR3 of antibody IMPI-018.

[0906] In one embodiment, HCDR3 is the HCDR3 of antibody IMPI-048.

[0907] In one embodiment, HCDR3 is the HCDR3 of antibody IMPI-033.

[0908] In one embodiment, HCDR3 is the HCDR3 of antibody IMPI-014.

[0909] In one embodiment, HCDR3 is the HCDR3 of antibody IMPI-038.

[0910] In one embodiment, HCDR3 is the HCDR3 of antibody IMPI-068.

[0911] In one embodiment, the present invention provides an anti-SARS-CoV-2 antibody, wherein the antibody comprises a variable heavy (VH) domain sequence comprising complementarity determining regions (CDRs) HCDR1, HCDR2, and HCDR3, and a variable light (VL) domain sequence comprising complementarity determining regions LCDR1, LCDR2 and LCDR3, wherein the CDRs are those of antibody IMPI-026, IMPI-034, IMPI-016, IMPI-050, IMPI-049, IMPI-015, IMPI-009, IMPI-011, IMPI-044, IMPI-046, IMPI-051, IMPI-024, IMPI-058, IMPI-043, IMPI-045, IMPI-027, IMPI-018, IMPI-048, IMPI-033, IMPI-014, IMPI-038 or IMPI-068.

[0912] In one embodiment, the antibody comprises a variable heavy (VH) domain sequence comprising complementarity determining regions (CDRs) HCDR1, HCDR2 and HCDR3, and a variable light (VL) domain sequence comprising complementarity determining regions LCDR1, LCDR2 and LCDR3, wherein the CDRs are those of antibody IMPI-026, IMPI-034, IMPI-016, IMPI-050, IMPI-049, IMPI-015, IMPI-009, IMPI-011, IMPI-044, IMPI-046, IMPI-051, IMPI-024, IMPI-058, IMPI-043, IMPI-045, IMPI-027, IMPI-018, IMPI-048, IMPI-033, IMPI-014, IMPI-038 or IMPI-068.

[0913] In one embodiment, the antibody is a neutralising antibody, wherein the antibody comprises a variable heavy (VH) domain sequence comprising complementarity determining regions (CDRs) HCDR1, HCDR2 and HCDR3, and a variable light (VL) domain sequence comprising complementarity determining regions LCDR1, LCDR2 and LCDR3, wherein the CDRs are those of antibody IMPI-024, IMPI-027, IMPI-038 or IMPI-068 or an antibody in the same cluster as one ofthese antibodies.

[0914] In one embodiment, the antibody is a neutralising antibody, wherein the antibody comprises a variable heavy (VH) domain sequence comprising complementarity determining regions (CDRs) HCDR1, HCDR2 and HCDR3, and a variable light (VL) domain sequence comprising complementarity determining regions LCDR1, LCDR2 and LCDR3, wherein the CDRs are those of antibody IMPI-024, IMPI-027, IMPI-038 or IMPI-068.

[0915] In one embodiment, the antibody increases binding between SARS-CoV-2 and the human ACE2 receptor, wherein the antibody comprises a variable heavy (VH) domain sequence comprising complementarity determining regions (CDRs) HCDR1, HCDR2, and HCDR3, and a variable light (VL) domain sequence comprising complementarity determining regions LCDR1, LCDR2 and LCDR3, wherein the CDRs are those of antibody IMPI-027, IMPI-033, IMPI-038 or IMPI-068, or an antibody in the same cluster as one ofthese antibodies.

[0916] In one embodiment, the antibody increases binding between SARS-CoV-2 and the human ACE2 receptor, wherein the antibody comprises a variable heavy (VH) domain sequence comprising complementarity determining regions (CDRs) HCDR1, HCDR2, and HCDR3, and a variable light (VL) domain sequence comprising complementarity determining regions LCDR1, LCDR2 and LCDR3, wherein the CDRs are those of antibody IMPI-027, IMPI-033, IMPI-038 or IMPI-068.

[0917] In one embodiment, the antibody has the CDRs of antibody IMPI-026.

[0918] In one embodiment, the antibody has the CDRs of antibody IMPI-034.

[0919] In one embodiment, the antibody has the CDRs of antibody IMPI-016.

[0920] In one embodiment, the antibody has the CDRs of antibody IMPI-050.

[0921] In one embodiment, the antibody has the CDRs of antibody IMPI-049.

[0922] In one embodiment, the antibody has the CDRs of antibody IMPI-015.

[0923] In one embodiment, the antibody has the CDRs of antibody IMPI-009.

[0924] In one embodiment, the antibody has the CDRs of antibody IMPI-011.

[0925] In one embodiment, the antibody has the CDRs of antibody IMPI-044.

[0926] In one embodiment, the antibody has the CDRs of antibody IMPI-046.

[0927] In one embodiment, the antibody has the CDRs of antibody IMPI-051.

[0928] In one embodiment, the antibody has the CDRs of antibody IMPI-024.

[0929] In one embodiment, the antibody has the CDRs of antibody IMPI-058.

[0930] In one embodiment, the antibody has the CDRs of antibody IMPI-043.

[0931] In one embodiment, the antibody has the CDRs of antibody IMPI-045.

[0932] In one embodiment, the antibody has the CDRs of antibody IMPI-027.

[0933] In one embodiment, the antibody has the CDRs of antibody IMPI-018.

[0934] In one embodiment, the antibody has the CDRs of antibody IMPI-048.

[0935] In one embodiment, the antibody has the CDRs of antibody IMPI-033.

[0936] In one embodiment, the antibody has the CDRs of antibody IMPI-014.

[0937] In one embodiment, the antibody has the CDRs of antibody IMPI-038.

[0938] In one embodiment, the antibody has the CDRs of antibody IMPI-068.

[0939] In one embodiment, the antibody comprises a variable heavy (VH) domain sequence and a variable light (VL) domain sequence and wherein the variable heavy (VH) domain and variable light (VL) domain sequences respectively comprise the variable heavy (VH) domain and variable light (VL) domain sequences of antibody IMPI-026, IMPI-034, IMPI-016, IMPI-050, IMPI-049, IMPI-015, IMPI-009, IMPI-011, IMPI-044, IMPI-046, IMPI-051, IMPI-024, IMPI-058, IMPI-043, IMPI-045, IMPI-027, IMPI-018, IMPI-048, IMPI-033, IMPI-014, IMPI-038 or IMPI-068, optionally with 1, 2, 3, 4 or 5 amino acid alterations outside the complementarity determining regions (CDRs) in the variable heavy (VH) domain sequence and optionally with 1, 2, 3, 4 or 5 amino acid alterations outside the complementarity determining regions (CDRs) in the variable light (VL) domain sequence.

[0940] In one embodiment, the antibody is a neutralising antibody, wherein the antibody comprises a variable heavy (VH) domain sequence and a variable light (VL) domain sequence and wherein the variable heavy (VH) domain and variable light (VL) domain sequences respectively comprise the variable heavy (VH) domain and variable light (VL) domain sequences of antibody IMPI-024, IMPI-027, IMPI-038 or IMPI-068, optionally with 1, 2, 3, 4 or 5 amino acid alterations outside the complementarity determining regions (CDRs) in the variable heavy (VH) domain sequence and optionally with 1, 2, 3, 4 or 5 amino acid alterations outside the complementarity determining regions (CDRs) in the variable light (VL) domain sequence or an antibody in the same cluster as one of these antibodies.

[0941] In one embodiment, the antibody is a neutralising antibody, wherein the antibody comprises a variable heavy (VH) domain sequence and a variable light (VL) domain sequence and wherein the variable heavy (VH) domain and variable light (VL) domain sequences respectively comprise the variable heavy (VH) domain and variable light (VL) domain sequences of antibody IMPI-024, IMPI-027, IMPI-038 or IMPI-068, optionally with 1, 2, 3, 4 or 5 amino acid alterations outside the complementarity determining regions (CDRs) in the variable heavy (VH) domain sequence and optionally with 1, 2, 3, 4 or 5 amino acid alterations outside the complementarity determining regions (CDRs) in the variable light (VL) domain sequence.

[0942] In one embodiment, the antibody increases binding between SARS-CoV-2 and the human ACE2 receptor, wherein the antibody comprises a variable heavy (VH) domain sequence and a variable light (VL) domain sequence and wherein the variable heavy (VH) domain and variable light (VL) domain sequences respectively comprise the variable heavy (VH) domain and variable light (VL) domain sequences of antibody IMPI-027, IMPI-033, IMPI-038 or IMPI-068, optionally with 1, 2, 3, 4 or 5 amino acid alterations outside the complementarity determining regions (CDRs) in the variable heavy (VH) domain sequence and optionally with 1, 2, 3, 4 or 5 amino acid alterations outside the complementarity determining regions (CDRs) in the variable light (VL) domain sequence or an antibody in the same cluster as one of these antibodies.

[0943] In one embodiment, the antibody increases binding between SARS-CoV-2 and the human ACE2 receptor, wherein the antibody comprises a variable heavy (VH) domain sequence and a variable light (VL) domain sequence and wherein the variable heavy (VH) domain and variable light (VL) domain sequences respectively comprise the variable heavy (VH) domain and variable light (VL) domain sequences of antibody IMPI-027, IMPI-033, IMPI-038 or IMPI-068, optionally with 1, 2, 3, 4 or 5 amino acid alterations outside the complementarity determining regions (CDRs) in the variable heavy (VH) domain sequence and optionally with 1, 2, 3, 4 or 5 amino acid alterations outside the complementarity determining regions (CDRs) in the variable light (VL) domain sequence.

[0944] In one embodiment, the antibody comprises a variable heavy (VH) domain sequence of antibody IMPI-026, optionally with 1, 2, 3, 4 or 5 amino acid alterations outside the complementarity determining regions (CDRs), and a variable light (VL) domain sequence of antibody IMPI-026, optionally with 1, 2, 3, 4 or 5 amino acid alterations outside the complementarity determining regions (CDRs).

[0945] In one embodiment, the antibody comprises a variable heavy (VH) domain sequence of antibody IMPI-034, optionally with 1, 2, 3, 4 or 5 amino acid alterations outside the complementarity determining regions (CDRs), and a variable light (VL) domain sequence of antibody IMPI-034, optionally with 1, 2, 3, 4 or 5 amino acid alterations outside the complementarity determining regions (CDRs).

[0946] In one embodiment, the antibody comprises a variable heavy (VH) domain sequence of antibody IMPI-016, optionally with 1, 2, 3, 4 or 5 amino acid alterations outside the complementarity determining regions (CDRs), and a variable light (VL) domain sequence of antibody IMPI-016, optionally with 1, 2, 3, 4 or 5 amino acid alterations outside the complementarity determining regions (CDRs).

[0947] In one embodiment, the antibody comprises a variable heavy (VH) domain sequence of antibody IMPI-050, optionally with 1, 2, 3, 4 or 5 amino acid alterations outside the complementarity determining regions (CDRs), and a variable light (VL) domain sequence of antibody IMPI-050, optionally with 1, 2, 3, 4 or 5 amino acid alterations outside the complementarity determining regions (CDRs).

[0948] In one embodiment, the antibody comprises a variable heavy (VH) domain sequence of antibody IMPI-049, optionally with 1, 2, 3, 4 or 5 amino acid alterations outside the complementarity determining regions (CDRs), and a variable light (VL) domain sequence of antibody IMPI-049, optionally with 1, 2, 3, 4 or 5 amino acid alterations outside the complementarity determining regions (CDRs).

[0949] In one embodiment, the antibody comprises a variable heavy (VH) domain sequence of antibody IMPI-015, optionally with 1, 2, 3, 4 or 5 amino acid alterations outside the complementarity determining regions (CDRs), and a variable light (VL) domain sequence of antibody IMPI-015, optionally with 1, 2, 3, 4 or 5 amino acid alterations outside the complementarity determining regions (CDRs).

[0950] In one embodiment, the antibody comprises a variable heavy (VH) domain sequence of antibody IMPI-009, optionally with 1, 2, 3, 4 or 5 amino acid alterations outside the complementarity determining regions (CDRs), and a variable light (VL) domain sequence of antibody IMPI-009, optionally with 1, 2, 3, 4 or 5 amino acid alterations outside the complementarity determining regions (CDRs).

[0951] In one embodiment, the antibody comprises a variable heavy (VH) domain sequence of antibody IMPI-011, optionally with 1, 2, 3, 4 or 5 amino acid alterations outside the complementarity determining regions (CDRs), and a variable light (VL) domain sequence of antibody IMPI-011, optionally with 1, 2, 3, 4 or 5 amino acid alterations outside the complementarity determining regions (CDRs).

[0952] In one embodiment, the antibody comprises a variable heavy (VH) domain sequence of antibody IMPI-044, optionally with 1, 2, 3, 4 or 5 amino acid alterations outside the complementarity determining regions (CDRs), and a variable light (VL) domain sequence of antibody IMPI-044, optionally with 1, 2, 3, 4 or 5 amino acid alterations outside the complementarity determining regions (CDRs).

[0953] In one embodiment, the antibody comprises a variable heavy (VH) domain sequence of antibody IMPI-046, optionally with 1, 2, 3, 4 or 5 amino acid alterations outside the complementarity determining regions (CDRs), and a variable light (VL) domain sequence of antibody IMPI-046, optionally with 1, 2, 3, 4 or 5 amino acid alterations outside the complementarity determining regions (CDRs).

[0954] In one embodiment, the antibody comprises a variable heavy (VH) domain sequence of antibody IMPI-051, optionally with 1, 2, 3, 4 or 5 amino acid alterations outside the complementarity determining regions (CDRs), and a variable light (VL) domain sequence of antibody IMPI-051, optionally with 1, 2, 3, 4 or 5 amino acid alterations outside the complementarity determining regions (CDRs).

[0955] In one embodiment, the antibody comprises a variable heavy (VH) domain sequence of antibody IMPI-024, optionally with 1, 2, 3, 4 or 5 amino acid alterations outside the complementarity determining regions (CDRs), and a variable light (VL) domain sequence of antibody IMPI-024, optionally with 1, 2, 3, 4 or 5 amino acid alterations outside the complementarity determining regions (CDRs).

[0956] In one embodiment, the antibody comprises a variable heavy (VH) domain sequence of antibody IMPI-058, optionally with 1, 2, 3, 4 or 5 amino acid alterations outside the complementarity determining regions (CDRs), and a variable light (VL) domain sequence of antibody IMPI-058, optionally with 1, 2, 3, 4 or 5 amino acid alterations outside the complementarity determining regions (CDRs).

[0957] In one embodiment, the antibody comprises a variable heavy (VH) domain sequence of antibody IMPI-043, optionally with 1, 2, 3, 4 or 5 amino acid alterations outside the complementarity determining regions (CDRs), and a variable light (VL) domain sequence of antibody IMPI-043, optionally with 1, 2, 3, 4 or 5 amino acid alterations outside the complementarity determining regions (CDRs).

[0958] In one embodiment, the antibody comprises a variable heavy (VH) domain sequence of antibody IMPI-045, optionally with 1, 2, 3, 4 or 5 amino acid alterations outside the complementarity determining regions (CDRs), and a variable light (VL) domain sequence of antibody IMPI-045, optionally with 1, 2, 3, 4 or 5 amino acid alterations outside the complementarity determining regions (CDRs).

[0959] In one embodiment, the antibody comprises a variable heavy (VH) domain sequence of antibody IMPI-027, optionally with 1, 2, 3, 4 or 5 amino acid alterations outside the complementarity determining regions (CDRs), and a variable light (VL) domain sequence of antibody IMPI-027, optionally with 1, 2, 3, 4 or 5 amino acid alterations outside the complementarity determining regions (CDRs).

[0960] In one embodiment, the antibody comprises a variable heavy (VH) domain sequence of antibody IMPI-018, optionally with 1, 2, 3, 4 or 5 amino acid alterations outside the complementarity determining regions (CDRs), and a variable light (VL) domain sequence of antibody IMPI-018, optionally with 1, 2, 3, 4 or 5 amino acid alterations outside the complementarity determining regions (CDRs).

[0961] In one embodiment, the antibody comprises a variable heavy (VH) domain sequence of antibody IMPI-048, optionally with 1, 2, 3, 4 or 5 amino acid alterations outside the complementarity determining regions (CDRs), and a variable light (VL) domain sequence of antibody IMPI-048, optionally with 1, 2, 3, 4 or 5 amino acid alterations outside the complementarity determining regions (CDRs).

[0962] In one embodiment, the antibody comprises a variable heavy (VH) domain sequence of antibody IMPI-033, optionally with 1, 2, 3, 4 or 5 amino acid alterations outside the complementarity determining regions (CDRs), and a variable light (VL) domain sequence of antibody IMPI-033, optionally with 1, 2, 3, 4 or 5 amino acid alterations outside the complementarity determining regions (CDRs).

[0963] In one embodiment, the antibody comprises a variable heavy (VH) domain sequence of antibody IMPI-014, optionally with 1, 2, 3, 4 or 5 amino acid alterations outside the complementarity determining regions (CDRs), and a variable light (VL) domain sequence of antibody IMPI-014, optionally with 1, 2, 3, 4 or 5 amino acid alterations outside the complementarity determining regions (CDRs).

[0964] In one embodiment, the antibody comprises a variable heavy (VH) domain sequence of antibody IMPI-038, optionally with 1, 2, 3, 4 or 5 amino acid alterations outside the complementarity determining regions (CDRs), and a variable light (VL) domain sequence of antibody IMPI-038, optionally with 1, 2, 3, 4 or 5 amino acid alterations outside the complementarity determining regions (CDRs).

[0965] In one embodiment, the antibody comprises a variable heavy (VH) domain sequence of antibody IMPI-068, optionally with 1, 2, 3, 4 or 5 amino acid alterations outside the complementarity determining regions (CDRs), and a variable light (VL) domain sequence of antibody IMPI-068, optionally with 1, 2, 3, 4 or 5 amino acid alterations outside the complementarity determining regions (CDRs).

[0966] In one embodiment, the antibody comprises a variable heavy (VH) domain sequence and a variable light (VL) domain sequence and wherein the variable heavy (VH) domain and variable light (VL) domain sequences respectively comprise a sequence having at least 90% identity to the variable heavy (VH) and variable light (VL) domain sequences of antibody IMPI-026, IMPI-034, IMPI-016, IMPI-050, IMPI-049, IMPI-015, IMPI-009, IMPI-011, IMPI-044, IMPI-046, IMPI-051, IMPI-024, IMPI-058, IMPI-043, IMPI-045, IMPI-027, IMPI-018, IMPI-048, IMPI-033, IMPI-014, IMPI-038 or IMPI-068, provided that the antibody has the CDRs of antibody IMPI-026, IMPI-034, IMPI-016, IMPI-050, IMPI-049, IMPI-015, IMPI-009, IMPI-011, IMPI-044, IMPI-046, IMPI-051, IMPI-024, IMPI-058, IMPI-043, IMPI-045, IMPI-027, IMPI-018, IMPI-048, IMPI-033, IMPI-014, IMPI-038 or IMPI-068.

[0967] In one embodiment, the antibody is a neutralising antibody, wherein the antibody comprises a variable heavy (VH) domain sequence and a variable light (VL) domain sequence and wherein the variable heavy (VH) domain and variable light (VL) domain sequences respectively comprise a sequence having at least 90% identity to the variable heavy (VH) and variable light (VL) domain sequences of antibody IMPI-024, IMPI-027, IMPI-038 or IMPI-068, or an antibody in the same cluster as one of these antibodies, provided that the antibody has the CDRs of antibody IMPI-024, IMPI-027, IMPI-038 or IMPI-068, or an antibody in the same cluster as one ofthese antibodies.

[0968] In one embodiment, the antibody is a neutralising antibody, wherein the antibody comprises a variable heavy (VH) domain sequence and a variable light (VL) domain sequence and wherein the variable heavy (VH) domain and variable light (VL) domain sequences respectively comprise a sequence having at least 90% identity to the variable heavy (VH) and variable light (VL) domain sequences of antibody IMPI-024, IMPI-027, IMPI-038 or IMPI-068, provided that the antibody has the CDRs of antibody IMPI-024, IMPI-027, IMPI-038 or IMPI-068.

[0969] In one embodiment, the antibody increases binding between SARS-CoV2 and the human ACE2 receptor, wherein the antibody comprises a variable heavy (VH) domain sequence and a variable light (VL) domain sequence and wherein the variable heavy (VH) domain and variable light (VL) domain sequences respectively comprise a sequence having at least 90% identity to the variable heavy (VH) and variable light (VL) domain sequences of antibody IMPI-027, IMPI-033, IMPI-038 or IMPI-068, or an antibody in the same cluster as one of these antibodies, provided that the antibody has the CDRs of antibody IMPI-027, IMPI-033, IMPI-038 or IMPI-068, or an antibody in the same cluster as one of these antibodies.

[0970] In one embodiment, the antibody increases binding between SARS-CoV2 and the human ACE2 receptor, wherein the antibody comprises a variable heavy (VH) domain sequence and a variable light (VL) domain sequence and wherein the variable heavy (VH) domain and variable light (VL) domain sequences respectively comprise a sequence having at least 90% identity to the variable heavy (VH) and variable light (VL) domain sequences of antibody IMPI-027, IMPI-033, IMPI-038 or IMPI-068, provided that the antibody has the CDRs of antibody IMPI-027, IMPI-033, IMPI-038 or IMPI-068.

[0971] In one embodiment, the variable heavy (VH) domain sequence comprises a sequence having at least 90% identity to the VH domain sequence of antibody IMPI-026 and the variable light (VL) domain sequence comprises a sequence having at least 90% identity to the VL domain sequence of antibody IMPI-026, provided that the antibody has the CDRs of antibody IMPI-026.

[0972] In one embodiment, the variable heavy (VH) domain sequence comprises a sequence having at least 90% identity to the VH domain sequence of antibody IMPI-034 and the variable light (VL) domain sequence comprises a sequence having at least 90% identity to the VL domain sequence of antibody IMPI-034, provided that the antibody has the CDRs of antibody IMPI-034.

[0973] In one embodiment, the variable heavy (VH) domain sequence comprises a sequence having at least 90% identity to the VH domain sequence of antibody IMPI-016 and the variable light (VL) domain sequence comprises a sequence having at least 90% identity to the VL domain sequence of antibody IMPI-016, provided that the antibody has the CDRs of antibody IMPI-016.

[0974] In one embodiment, the variable heavy (VH) domain sequence comprises a sequence having at least 90% identity to the VH domain sequence of antibody IMPI-050 and the variable light (VL) domain sequence comprises a sequence having at least 90% identity to the VL domain sequence of antibody IMPI-050, provided that the antibody has the CDRs of antibody IMPI-050.

[0975] In one embodiment, the variable heavy (VH) domain sequence comprises a sequence having at least 90% identity to the VH domain sequence of antibody IMPI-049 and the variable light (VL) domain sequence comprises a sequence having at least 90% identity to the VL domain sequence of antibody IMPI-049, provided that the antibody has the CDRs of antibody IMPI-049.

[0976] In one embodiment, the variable heavy (VH) domain sequence comprises a sequence having at least 90% identity to the VH domain sequence of antibody IMPI-015 and the variable light (VL) domain sequence comprises a sequence having at least 90% identity to the VL domain sequence of antibody IMPI-015, provided that the antibody has the CDRs of antibody IMPI-015.

[0977] In one embodiment, the variable heavy (VH) domain sequence comprises a sequence having at least 90% identity to the VH domain sequence of antibody IMPI-009 and the variable light (VL) domain sequence comprises a sequence having at least 90% identity to the VL domain sequence of antibody IMPI-009, provided that the antibody has the CDRs of antibody IMPI-009.

[0978] In one embodiment, the variable heavy (VH) domain sequence comprises a sequence having at least 90% identity to the VH domain sequence of antibody IMPI-011 and the variable light (VL) domain sequence comprises a sequence having at least 90% identity to the VL domain sequence of antibody IMPI-011, provided that the antibody has the CDRs of antibody IMPI-011.

[0979] In one embodiment, the variable heavy (VH) domain sequence comprises a sequence having at least 90% identity to the VH domain sequence of antibody IMPI-044 and the variable light (VL) domain sequence comprises a sequence having at least 90% identity to the VL domain sequence of antibody IMPI-044, provided that the antibody has the CDRs of antibody IMPI-044.

[0980] In one embodiment, the variable heavy (VH) domain sequence comprises a sequence having at least 90% identity to the VH domain sequence of antibody IMPI-046 and the variable light (VL) domain sequence comprises a sequence having at least 90% identity to the VL domain sequence of antibody IMPI-046, provided that the antibody has the CDRs of antibody IMPI-046.

[0981] In one embodiment, the variable heavy (VH) domain sequence comprises a sequence having at least 90% identity to the VH domain sequence of antibody IMPI-051 and the variable light (VL) domain sequence comprises a sequence having at least 90% identity to the VL domain sequence of antibody IMPI-051, provided that the antibody has the CDRs of antibody IMPI-051.

[0982] In one embodiment, the variable heavy (VH) domain sequence comprises a sequence having at least 90% identity to the VH domain sequence of antibody IMPI-024 and the variable light (VL) domain sequence comprises a sequence having at least 90% identity to the VL domain sequence of antibody IMPI-024, provided that the antibody has the CDRs of antibody IMPI-024.

[0983] In one embodiment, the variable heavy (VH) domain sequence comprises a sequence having at least 90% identity to the VH domain sequence of antibody IMPI-058 and the variable light (VL) domain sequence comprises a sequence having at least 90% identity to the VL domain sequence of antibody IMPI-058, provided that the antibody has the CDRs of antibody IMPI-058.

[0984] In one embodiment, the variable heavy (VH) domain sequence comprises a sequence having at least 90% identity to the VH domain sequence of antibody IMPI-043 and the variable light (VL) domain sequence comprises a sequence having at least 90% identity to the VL domain sequence of antibody IMPI-043, provided that the antibody has the CDRs of antibody IMPI-043.

[0985] In one embodiment, the variable heavy (VH) domain sequence comprises a sequence having at least 90% identity to the VH domain sequence of antibody IMPI-045 and the variable light (VL) domain sequence comprises a sequence having at least 90% identity to the VL domain sequence of antibody IMPI-045, provided that the antibody has the CDRs of antibody IMPI-045.

[0986] In one embodiment, the variable heavy (VH) domain sequence comprises a sequence having at least 90% identity to the VH domain sequence of antibody IMPI-027 and the variable light (VL) domain sequence comprises a sequence having at least 90% identity to the VL domain sequence of antibody IMPI-027, provided that the antibody has the CDRs of antibody IMPI-027.

[0987] In one embodiment, the variable heavy (VH) domain sequence comprises a sequence having at least 90% identity to the VH domain sequence of antibody IMPI-018 and the variable light (VL) domain sequence comprises a sequence having at least 90% identity to the VL domain sequence of antibody IMPI-018, provided that the antibody has the CDRs of antibody IMPI-018.

[0988] In one embodiment, the variable heavy (VH) domain sequence comprises a sequence having at least 90% identity to the VH domain sequence of antibody IMPI-048 and the variable light (VL) domain sequence comprises a sequence having at least 90% identity to the VL domain sequence of antibody IMPI-048, provided that the antibody has the CDRs of antibody IMPI-048.

[0989] In one embodiment, the variable heavy (VH) domain sequence comprises a sequence having at least 90% identity to the VH domain sequence of antibody IMPI-033 and the variable light (VL) domain sequence comprises a sequence having at least 90% identity to the VL domain sequence of antibody IMPI-033, provided that the antibody has the CDRs of antibody IMPI-033.

[0990] In one embodiment, the variable heavy (VH) domain sequence comprises a sequence having at least 90% identity to the VH domain sequence of antibody IMPI-014 and the variable light (VL) domain sequence comprises a sequence having at least 90% identity to the VL domain sequence of antibody IMPI-014, provided that the antibody has the CDRs of antibody IMPI-014.

[0991] In one embodiment, the variable heavy (VH) domain sequence comprises a sequence having at least 90% identity to the VH domain sequence of antibody IMPI-038 and the variable light (VL) domain sequence comprises a sequence having at least 90% identity to the VL domain sequence of antibody IMPI-038, provided that the antibody has the CDRs of antibody IMPI-038.

[0992] In one embodiment, the variable heavy (VH) domain sequence comprises a sequence having at least 90% identity to the VH domain sequence of antibody IMPI-068 and the variable light (VL) domain sequence comprises a sequence having at least 90% identity to the VL domain sequence of antibody IMPI-068, provided that the antibody has the CDRs of antibody IMPI-068.

[0993] In one embodiment, the antibody comprises a variable heavy (VH) domain sequence and a variable light (VL) domain sequence and wherein the variable heavy (VH) domain and variable light (VL) domain sequences respectively comprise the variable heavy (VH) and variable light (VL) domain sequences of antibody IMPI-026, IMPI-034, IMPI-016, IMPI-050, IMPI-049, IMPI-015, IMPI-009, IMPI-011, IMPI-044, IMPI-046, IMPI-051, IMPI-024, IMPI-058, IMPI-043, IMPI-045, IMPI-027, IMPI-018, IMPI-048, IMPI-033, IMPI-014, IMPI-038 or IMPI-068.

[0994] In one embodiment, the antibody is a neutralising antibody, wherein the antibody comprises a variable heavy (VH) domain sequence and a variable light (VL) domain sequence and wherein the variable heavy (VH) domain and variable light (VL) domain sequences respectively comprise the variable heavy (VH) and variable light (VL) domain sequences of antibody IMPI-024, IMPI-027, IMPI-038 or IMPI-068 or an antibody in the same cluster as one of these antibodies.

[0995] In one embodiment, the antibody is a neutralising antibody, wherein the antibody comprises a variable heavy (VH) domain sequence and a variable light (VL) domain sequence and wherein the variable heavy (VH) domain and variable light (VL) domain sequences respectively comprise the variable heavy (VH) and variable light (VL) domain sequences of antibody IMPI-024, IMPI-027, IMPI-038 or IMPI-068.

[0996] In one embodiment, the antibody increases binding between SARS-CoV2 and the human ACE2 receptor, wherein the antibody comprises a variable heavy (VH) domain sequence and a variable light (VL) domain sequence and wherein the variable heavy (VH) domain and variable light (VL) domain sequences respectively comprise the variable heavy (VH) and variable light (VL) domain sequences of antibody IMPI-027, IMPI-033, IMPI-038 or IMPI-068 or an antibody in the same cluster as one of these antibodies.

[0997] In one embodiment, the antibody increases binding between SARS-CoV2 and the human ACE2 receptor, wherein the antibody comprises a variable heavy (VH) domain sequence and a variable light (VL) domain sequence and wherein the variable heavy (VH) domain and variable light (VL) domain sequences respectively comprise the variable heavy (VH) and variable light (VL) domain sequences of antibody IMPI-027, IMPI-033, IMPI-038 or IMPI-068.

[0998] In one embodiment, the present invention provides an anti-SARS-CoV2 antibody, wherein the antibody comprises a variable heavy (VH) domain sequence and a variable light (VL) domain sequence and wherein the variable heavy (VH) domain and variable light (VL) domain sequences respectively comprise the variable heavy (VH) and variable light (VL) domain sequences of antibody IMPI-026, IMPI-034, IMPI-016, IMPI-050, IMPI-049, IMPI-015, IMPI-009, IMPI-011, IMPI-044, IMPI-046, IMPI-051, IMPI-024, IMPI-058, IMPI-043, IMPI-045, IMPI-027, IMPI-018, IMPI-048, IMPI-033, IMPI-014, IMPI-038 or IMPI-068.

[0999] In one embodiment, the variable heavy (VH) domain sequence comprises the VH domain sequence of antibody IMPI-026 and the variable light (VL) domain sequence comprises the VL domain sequence of antibody IMPI-026.

[1000] In one embodiment, the variable heavy (VH) domain sequence comprises the VH domain sequence of antibody IMPI-034 and the variable light (VL) domain sequence comprises the VL domain sequence of antibody IMPI-034.

[1001] In one embodiment, the variable heavy (VH) domain sequence comprises the VH domain sequence of antibody IMPI-016 and the variable light (VL) domain sequence comprises the VL domain sequence of antibody IMPI-016.

[1002] In one embodiment, the variable heavy (VH) domain sequence comprises the VH domain sequence of antibody IMPI-050 and the variable light (VL) domain sequence comprises the VL domain sequence of antibody IMPI-050.

[1003] In one embodiment, the variable heavy (VH) domain sequence comprises the VH domain sequence of antibody IMPI-049 and the variable light (VL) domain sequence comprises the VL domain sequence of antibody IMPI-049.

[1004] In one embodiment, the variable heavy (VH) domain sequence comprises the VH domain sequence of antibody IMPI-015 and the variable light (VL) domain sequence comprises the VL domain sequence of antibody IMPI-015.

[1005] In one embodiment, the variable heavy (VH) domain sequence comprises the VH domain sequence of antibody IMPI-009 and the variable light (VL) domain sequence comprises the VL domain sequence of antibody IMPI-009.

[1006] In one embodiment, the variable heavy (VH) domain sequence comprises the VH domain sequence of antibody IMPI-011 and the variable light (VL) domain sequence comprises the VL domain sequence of antibody IMPI-011.

[1007] In one embodiment, the variable heavy (VH) domain sequence comprises the VH domain sequence of antibody IMPI-044 and the variable light (VL) domain sequence comprises the VL domain sequence of antibody IMPI-044.

[1008] In one embodiment, the variable heavy (VH) domain sequence comprises the VH domain sequence of antibody IMPI-046 and the variable light (VL) domain sequence comprises the VL domain sequence of antibody IMPI-046.

[1009] In one embodiment, the variable heavy (VH) domain sequence comprises the VH domain sequence of antibody IMPI-051 and the variable light (VL) domain sequence comprises the VL domain sequence of antibody IMPI-051.

[1010] In one embodiment, the variable heavy (VH) domain sequence comprises the VH domain sequence of antibody IMPI-024 and the variable light (VL) domain sequence comprises the VL domain sequence of antibody IMPI-024.

[1011] In one embodiment, the variable heavy (VH) domain sequence comprises the VH domain sequence of antibody IMPI-058 and the variable light (VL) domain sequence comprises the VL domain sequence of antibody IMPI-058.

[1012] In one embodiment, the variable heavy (VH) domain sequence comprises the VH domain sequence of antibody IMPI-043 and the variable light (VL) domain sequence comprises the VL domain sequence of antibody IMPI-043.

[1013] In one embodiment, the variable heavy (VH) domain sequence comprises the VH domain sequence of antibody IMPI-045 and the variable light (VL) domain sequence comprises the VL domain sequence of antibody IMPI-045.

[1014] In one embodiment, the variable heavy (VH) domain sequence comprises the VH domain sequence of antibody IMPI-027 and the variable light (VL) domain sequence comprises the VL domain sequence of antibody IMPI-027.

[1015] In one embodiment, the variable heavy (VH) domain sequence comprises the VH domain sequence of antibody IMPI-018 and the variable light (VL) domain sequence comprises the VL domain sequence of antibody IMPI-018.

[1016] In one embodiment, the variable heavy (VH) domain sequence comprises the VH domain sequence of antibody IMPI-048 and the variable light (VL) domain sequence comprises the VL domain sequence of antibody IMPI-048.

[1017] In one embodiment, the variable heavy (VH) domain sequence comprises the VH domain sequence of antibody IMPI-033 and the variable light (VL) domain sequence comprises the VL domain sequence of antibody IMPI-033.

[1018] In one embodiment, the variable heavy (VH) domain sequence comprises the VH domain sequence of antibody IMPI-014 and the variable light (VL) domain sequence comprises the VL domain sequence of antibody IMPI-014.

[1019] In one embodiment, the variable heavy (VH) domain sequence comprises the VH domain sequence of antibody IMPI-038 and the variable light (VL) domain sequence comprises the VL domain sequence of antibody IMPI-038.

[1020] In one embodiment, the variable heavy (VH) domain sequence comprises the VH domain sequence of antibody IMPI-068 and the variable light (VL) domain sequence comprises the VL domain sequence of antibody IMPI-068.

[1021] In one embodiment, the antibody neutralises SARS-CoV2 with an IC50 of 2 nM or greater (e.g. as measured in a pseudovirus neutralisation assay) (see, for example, IMPI-024; IMPI-068; IMPI-027; and IMPI-038).

[1022] In one embodiment, the antibody neutralises SARS-CoV2 with an IC50 of 5 nM or greater (e.g. as measured in a pseudovirus neutralisation assay) (see, for example, IMPI-024; IMPI-068; IMPI-027; IMPI-038).

[1023] In one embodiment, the antibody neutralises SARS-CoV2 with an IC50 of 10 nM or greater (e.g. as measured in a pseudovirus neutralisation assay) (see, for example, IMPI-068; IMPI-027; and IMPI-038).

[1024] In one embodiment, the antibody neutralises SARS-CoV2 with an IC50 of 30 nM or greater (e.g. as measured in a pseudovirus neutralisation assay) (see, for example, IMPI-027 and IMPI-038).

[1025] In one embodiment, the antibody neutralises SARS-CoV2 with an IC50 of 50 nM or greater (e.g. as measured in a pseudovirus neutralisation assay) (see, for example, IMPI-038).

[1026] In one embodiment, the antibody comprises VH and/or VL domain framework regions of human germline gene segment sequences.

[1027] In one embodiment, the antibody comprises an antibody VH domain which
[1028] i) is derived from recombination of a human heavy chain V gene segment, a human heavy chain D gene segment and a human heavy chain J gene segment, wherein the V gene segment is IGHV5-51*01, IGHV4-31*03 or IGHV3-30*18;
[1029] and/or the J gene segment is IGHJ4*02 or IGHJ6*02, or
[1030] ii) comprises framework regions FR1, FR2, FR3 and FR4, wherein FR1 aligns with human germline V gene segment IGHV5-51*01, IGHV4-31*03 or IGHV3-30*18 with up to 1, 2, 3, 4, or 5 amino acid alterations, FR2 aligns with human germline V gene segment IGHV5-51*01, IGHV4-31*03 or IGHV3-30*18 with up to 1, 2, 3, 4, or 5 amino acid alterations, FR3 aligns with human germline V gene segment IGHV5-51*01, IGHV4-31*03 or IGHV3-30*18 with up to 1, 2, 3, 4 or 5 amino acid alterations, and/or FR4 aligns with human germline J gene segment IGHJ4*02 or IGHJ6*02 with up to 1, 2, 3, 4 or 5 amino acid alterations.

[1031] In one embodiment, the antibody comprises an antibody VH domain which
[1032] i) is derived from recombination of a human heavy chain V gene segment IGHV5-51*01, IGHV4-31*03 or IGHV3-30*18, a human heavy chain D gene segment and a human heavy chain J gene segment, or
[1033] ii) comprises framework regions FR1, FR2, FR3 and FR4, wherein FR1, FR2 and FR3 each align with human germline V segment IGHV5-51*01, IGHV4-31*03 or IGHV3-30*18 with up to 1, 2, 3, 4 or 5 amino acid alterations.

[1034] In one embodiment, the J gene segment is IGHJ4*02 or IGHJ6*02, or the VH domain framework region FR4 aligns with human germline J gene segment IGHJ4*02 or IGHJ6*02 with 1, 2, 3, 4 or 5 amino acid alterations.

[1035] In one embodiment, the antibody comprises an antibody VL domain which
[1036] i) is derived from recombination of a human light chain V gene segment and a human light chain J gene segment, wherein
   [1037] the V gene segment is IGKV1D-13*d01 or IGKV1-12*01, and/or
   [1038] the J gene segment is IGKJ1*01, IGKJ4*01 or IGKJ3*01; or
[1039] ii) comprises framework regions FR1, FR2, FR3 and FR4, wherein
   [1040] FR1 aligns with human germline V gene segment IGKV1D-13*d01 or IGKV1-12*01 with up to 1, 2, 3, 4, or 5 amino acid alterations,
   [1041] FR2 aligns with human germline V gene segment IGKV1D-13*d01 or IGKV1-12*01 with up to 1, 2, 3, 4, or 5 amino acid alterations
   [1042] FR3 aligns with human germline V gene segment IGKV1D-13*d01 or IGKV1-12*01 with up to 1, 2, 3, 4 or 5 amino acid alterations, and/or
   [1043] FR4 aligns with human germline J gene segment IGKJ1*01, IGKJ4*01 or IGKJ3*01 with up to 1, 2, 3, 4 or 5 amino acid alterations.

[1044] In one embodiment, the antibody comprises an antibody VL domain derived from recombination of a human light chain V gene segment and a human light chain J gene segment, wherein:
[1045] the V gene segment is IGKV1D-13*d01 or IGKV1-12*01, and optionally the J gene segment is IGKJ1*01, IGKJ4*01 or IGKJ3*01.

[1046] Example combinations of v and j gene segments for heavy and light chain variable domains are shown in Table 3, and these represent preferred combinations. The heavy and light chain variable domains may optionally be derived from the v and j gene segments identified in Table 3 for any one individual IMPI antibody identified in this Group D section.

Further non-competing RBD binders

[1047] According to the fourth aspect of the invention, further antibodies are provided herein which specifically bind to the RBD of the SARS-CoV-2 spike protein and do not compete for binding to the SARS-CoV-2 spike protein with the human ACE2 receptor. For example, antibodies YANG-1111, YANG-1102, YANG-1401, YANG-1401a, YANG-1401b, YANG-1401c, YANG-1401d, YANG-1401e, YANG-1402, YANG-1403, and YANG-2112 as exemplified herein have been found to specifically bind to the RBD of the SARS-CoV-2 spike protein and do not compete for binding to the SARS-CoV-2 spike protein with the human ACE2 receptor.

[1048] In one embodiment, the antibody comprises a variable heavy (VH) domain sequence comprising complementarity determining regions (CDRs) HCDR1, HCDR2 and HCDR3, and a variable light (VL) domain sequence comprising complementarity determining regions LCDR1, LCDR2 and LCDR3, wherein the HCDR3 is the HCDR3 of antibody YANG-1111, YANG-1102, YANG-1401, YANG-1401a, YANG-1401b, YANG-1401c, YANG-1401d, YANG-1401e, YANG-1402, YANG-1403 or YANG-2112.

[1049] In one embodiment, HCDR3 is the HCDR3 of antibody YANG-1102.

[1050] In one embodiment, HCDR3 is the HCDR3 of antibody YANG-1111.

[1051] In one embodiment, HCDR3 is the HCDR3 of antibody YANG-1401.

[1052] In one embodiment, HCDR3 is the HCDR3 of antibody YANG-1402.

[1053] In one embodiment, HCDR3 is the HCDR3 of antibody YANG-1403.

[1054] In one embodiment, HCDR3 is the HCDR3 of antibody YANG-2112.

[1055] In one embodiment, the antibody specifically binds to the RBD of the SARS-CoV-2 spike protein, and HCDR3 is the HCDR3 of antibody YANG-1111, YANG-1102, YANG-1401, YANG-1401a, YANG-1401b, YANG-1401c, YANG-1401d, YANG-1401e, YANG-1402, YANG-1403 or YANG-2112.

[1056] In one embodiment, the antibody specifically binds to the RBD of the SARS-CoV-2 spike protein with a KD of 0.1 nM or lower (e.g. as measured by surface plasmon resonance (SPR)), and HCDR3 is the HCDR3 of antibody YANG-1111, YANG-1102, YANG-1401, YANG-1401a, YANG-1401b, YANG-1401c, YANG-1401d, YANG-1401e, YANG-1402, YANG-1403 or YANG-2112.

[1057] In one embodiment, the antibody specifically binds to the RBD of the SARS-CoV-2 spike protein and neutralises SARS-CoV-2 with at least 70%, 85%, or 90% neutralisation (e.g. as measured in a pseudovirus neutralisation assay), and HCDR3 is the HCDR3 of antibody YANG-1111, YANG-1102, YANG-1401, YANG-1401a, YANG-1401b, YANG-1401c, YANG-1401d, YANG-1401e, YANG-1402, YANG-1403 or YANG-2112.

[1058] In one embodiment, the antibody specifically binds to the RBD of the SARS-CoV-2 spike protein with a KD of 0.1 nM or lower (e.g. as measured by surface plasmon resonance (SPR)) and neutralises SARS-CoV-2 with at least 70%, 85%, or 90% neutralisation (e.g. as measured in a pseudovirus neutralisation assay), and HCDR3 is the HCDR3 of antibody YANG-1I11, YANG-1102, YANG-1401, YANG-1401a, YANG-1401b, YANG-1401c, YANG-1401d, YANG-1401e, YANG-1402, YANG-1403 or YANG-2112.

[1059] In one embodiment, the present invention provides an anti-SARS-CoV-2 antibody, wherein the antibody comprises a variable heavy (VH) domain sequence comprising complementarity determining regions (CDRs) HCDR1, HCDR2, and HCDR3, and a variable light (VL) domain sequence comprising complementarity determining regions LCDR1, LCDR2 and LCDR3, wherein the CDRs are those of antibody YANG-1111, YANG-1102, YANG-1401, YANG-1401a, YANG-1401b, YANG-1401c, YANG-1401d, YANG-1401e, YANG-1402, YANG-1403 or YANG-2112.

[1060] In one embodiment, the antibody has the CDRs of antibody YANG-1102.

[1061] In one embodiment, the antibody has the CDRs of antibody YANG-1111.

[1062] In one embodiment, the antibody has the CDRs of antibody YANG-1401.

[1063] In one embodiment, the antibody has the CDRs of antibody YANG-1402.

[1064] In one embodiment, the antibody has the CDRs of antibody YANG-1403.

[1065] In one embodiment, the antibody has the CDRs of antibody YANG-2112.

[1066] In one embodiment, the antibody specifically binds to the RBD ofthe SARS-CoV-2 spike protein, and the CDRs are those of antibody YANG-1111, YANG-1102, YANG-1401, YANG-1401a, YANG-1401b, YANG-1401c, YANG-1401d, YANG-1401e, YANG-1402, YANG-1403 or YANG-2112.

[1067] In one embodiment, the antibody specifically binds to the RBD of the SARS-CoV-2 spike protein with a KD of 0.1 nM or lower (e.g. as measured by surface plasmon resonance (SPR)), and the CDRs are those of antibody YANG-1111, YANG-1102, YANG-1401, YANG-1401a, YANG-1401b, YANG-1401c, YANG-1401d, YANG-1401e, YANG-1402, YANG-1403 or YANG-2112.

[1068] In one embodiment, the antibody specifically binds to the RBD of the SARS-CoV-2 spike protein and neutralises SARS-CoV-2 with at least 70%, 85%, or 90% neutralisation (e.g. as measured in a pseudovirus neutralisation assay), and the CDRs are those of antibody YANG-1111, YANG-1102, YANG-1401, YANG-1401a, YANG-1401b, YANG-1401c, YANG-1401d, YANG-1401e, YANG-1402, YANG-1403 or YANG-2112.

[1069] In one embodiment, the antibody specifically binds to the RBD of the SARS-CoV-2 spike protein with a KD of 0.1 nM or lower (e.g. as measured by surface plasmon resonance (SPR)) and neutralises SARS-CoV-2 with at least 70%, 85%, or 90% neutralisation (e.g. as measured in a pseudovirus neutralisation assay), and the CDRs are those of antibody YANG-1111, YANG-1102, YANG-1401, YANG-1401a, YANG-1401b, YANG-1401c, YANG-1401d, YANG-1401e, YANG-1402, YANG-1403 or YANG-2112.

[1070] In one embodiment, the antibody comprises a variable heavy (VH) domain sequence and a variable light (VL) domain sequence and wherein the variable heavy (VH) domain and variable light (VL) domain sequences respectively comprise the variable heavy (VH) domain and variable light (VL) domain sequences of antibody YANG-1111, YANG-1102, YANG-1401, YANG-1401a, YANG-1401b, YANG-1401c, YANG-1401d, YANG-1401e, YANG-1402, YANG-1403 or YANG-2112, optionally with 1, 2, 3, 4 or 5 amino acid alterations outside the complementarity determining regions (CDRs) in the variable heavy (VH) domain sequence and optionally with 1, 2, 3, 4 or 5 amino acid alterations outside the complementarity determining regions (CDRs) in the variable light (VL) domain sequence.

[1071] In one embodiment, the antibody comprises a variable heavy (VH) domain sequence of antibody YANG-1111, optionally with 1, 2, 3, 4 or 5 amino acid alterations outside the complementarity determining regions (CDRs), and a variable light (VL) domain sequence of antibody YANG-1111, optionally with 1, 2, 3, 4 or 5 amino acid alterations outside the complementarity determining regions (CDRs).

[1072] In one embodiment, the antibody comprises a variable heavy (VH) domain sequence of antibody YANG-1102, optionally with 1, 2, 3, 4 or 5 amino acid alterations outside the complementarity determining regions (CDRs), and a variable light (VL) domain sequence of antibody YANG-1102, optionally with 1, 2, 3, 4 or 5 amino acid alterations outside the complementarity determining regions (CDRs).

[1073] In one embodiment, the antibody comprises a variable heavy (VH) domain sequence of antibody YANG-1401, optionally with 1, 2, 3, 4 or 5 amino acid alterations outside the complementarity determining regions (CDRs), and a variable light (VL) domain sequence of antibody YANG-1401, optionally with 1, 2, 3, 4 or 5 amino acid alterations outside the complementarity determining regions (CDRs).

[1074] In one embodiment, the antibody comprises a variable heavy (VH) domain sequence of antibody YANG-1402, optionally with 1, 2, 3, 4 or 5 amino acid alterations outside the complementarity determining regions (CDRs), and a variable light (VL) domain sequence of antibody YANG-1402, optionally with 1, 2, 3, 4 or 5 amino acid alterations outside the complementarity determining regions (CDRs).

[1075] In one embodiment, the antibody comprises a variable heavy (VH) domain sequence of antibody YANG-1403, optionally with 1, 2, 3, 4 or 5 amino acid alterations outside the complementarity determining regions (CDRs), and a variable light (VL) domain sequence of antibody YANG-1403, optionally with 1, 2, 3, 4 or 5 amino acid alterations outside the complementarity determining regions (CDRs).

[1076] In one embodiment, the antibody comprises a variable heavy (VH) domain sequence of antibody YANG-2112, optionally with 1, 2, 3, 4 or 5 amino acid alterations outside the complementarity determining regions (CDRs), and a variable light (VL) domain sequence of antibody YANG-2112, optionally with 1, 2, 3, 4 or 5 amino acid alterations outside the complementarity determining regions (CDRs).

[1077] In one embodiment, the antibody specifically binds to the RBD of the SARS-CoV-2 spike protein, and the variable heavy (VH) domain and variable light (VL) domain sequences respectively comprise the variable heavy (VH) domain and variable light (VL) domain sequences of antibody YANG-1111, YANG-1102, YANG-1401, YANG-1401a, YANG-1401b, YANG-1401c, YANG-1401d, YANG-1401e, YANG-1402, YANG-1403 or YANG-2112, optionally with 1, 2, 3, 4 or 5 amino acid alterations outside the complementarity determining regions (CDRs) in the variable heavy (VH) domain sequence and optionally with 1, 2, 3, 4 or 5 amino acid alterations outside the complementarity determining regions (CDRs) in the variable light (VL) domain sequence.

[1078] In one embodiment, the antibody specifically binds to the RBD of the SARS-CoV-2 spike protein with a KD of 0.1 nM or lower (e.g. as measured by surface plasmon resonance (SPR)), and the variable heavy (VH) domain and variable light (VL) domain sequences respectively comprise the variable heavy (VH) domain and variable light (VL) domain sequences of antibody YANG-1111, YANG-1102, YANG-1401, YANG-1401a, YANG-1401b, YANG-1401c, YANG-1401d, YANG-1401e, YANG-1402, YANG-1403 or YANG-2112, optionally with 1, 2, 3, 4 or 5 amino acid alterations outside the complementarity determining regions (CDRs) in the variable heavy (VH) domain sequence and optionally with 1, 2, 3, 4 or 5 amino acid alterations outside the complementarity determining regions (CDRs) in the variable light (VL) domain sequence.

[1079] In one embodiment, the antibody specifically binds to the RBD of the SARS-CoV-2 spike protein and neutralises SARS-CoV-2 with at least 70%, 85%, or 90% neutralisation (e.g. as measured in a pseudovirus neutralisation assay), and the variable heavy (VH) domain and variable light (VL) domain sequences respectively comprise the variable heavy (VH) domain and variable light (VL) domain sequences of antibody YANG-1111, YANG-1102, YANG-1401, YANG-1401a, YANG-1401b, YANG-1401c, YANG-1401d, YANG-1401e, YANG-1402, YANG-1403 or YANG-2112, optionally with 1, 2, 3, 4 or 5 amino acid alterations outside the complementarity determining regions (CDRs) in the variable heavy (VH) domain sequence and optionally with 1, 2, 3, 4 or 5 amino acid alterations outside the complementarity determining regions (CDRs) in the variable light (VL) domain sequence.

[1080] In one embodiment, the antibody specifically binds to the RBD of the SARS-CoV-2 spike protein with a KD of 0.1 nM or lower (e.g. as measured by surface plasmon resonance (SPR)) and neutralises SARS-CoV-2 with at least 70%, 85%, or 90% neutralisation (e.g. as measured in a pseudovirus neutralisation assay), and the variable heavy (VH) domain and variable light (VL) domain sequences respectively comprise the variable heavy (VH) domain and variable light (VL) domain sequences of antibody YANG-1111, YANG-1102, YANG-1401, YANG-1401a, YANG-1401b, YANG-1401c, YANG-1401d, YANG-1401e, YANG-1402, YANG-1403 or YANG-2112, optionally with 1, 2, 3, 4 or 5 amino acid alterations outside the complementarity determining regions (CDRs) in the variable heavy (VH) domain sequence and optionally with 1, 2, 3, 4 or 5 amino acid alterations outside the complementarity determining regions (CDRs) in the variable light (VL) domain sequence.

[1081] In one embodiment, the antibody comprises a variable heavy (VH) domain sequence and a variable light (VL) domain sequence and wherein the variable heavy (VH) domain and variable light (VL) domain sequences respectively comprise a sequence having at least 90% identity to the variable heavy (VH) and variable light (VL) domain sequences of antibody provided that the antibody has the CDRs of antibody YANG-1111, YANG-1102, YANG-1401, YANG-1401a, YANG-1401b, YANG-1401c, YANG-1401d, YANG-1401e, YANG-1402, YANG-1403 or YANG-2112, respectively.

[1082] In one embodiment, the variable heavy (VH) domain sequence comprises a sequence having at least 90% identity to the VH domain sequence of antibody YANG-1102 and the variable light (VL) domain sequence comprises a sequence having at least 90% identity to the VL domain sequence of antibody YANG-1102, provided that the antibody has the CDRs of antibody YANG-1102.

[1083] In one embodiment, the variable heavy (VH) domain sequence comprises a sequence having at least 90% identity to the VH domain sequence of antibody YANG-1111 and the variable light (VL) domain sequence comprises a sequence having at least 90% identity to the VL domain sequence of antibody YANG-1111, provided that the antibody has the CDRs of antibody YANG-1111.

[1084] In one embodiment, the variable heavy (VH) domain sequence comprises a sequence having at least 90% identity to the VH domain sequence of antibody YANG-1401 and the variable light (VL) domain sequence comprises a sequence having at least 90% identity to the VL domain sequence of antibody YANG-1401, provided that the antibody has the CDRs of antibody YANG-1401.

[1085] In one embodiment, the variable heavy (VH) domain sequence comprises a sequence having at least 90% identity to the VH domain sequence of antibody YANG-1402 and the variable light (VL) domain sequence comprises a sequence having at least 90% identity to the VL domain sequence of antibody YANG-1402, provided that the antibody has the CDRs of antibody YANG-1402.

[1086] In one embodiment, the variable heavy (VH) domain sequence comprises a sequence having at least 90% identity to the VH domain sequence of antibody YANG-1403 and the variable light (VL) domain sequence comprises a sequence having at least 90% identity to the VL domain sequence of antibody YANG-1403, provided that the antibody has the CDRs of antibody YANG-1403.

[1087] In one embodiment, the variable heavy (VH) domain sequence comprises a sequence having at least 90% identity to the VH domain sequence of antibody YANG-2112 and the variable light (VL) domain sequence comprises a sequence having at least 90% identity to the VL domain sequence of antibody YANG-2112, provided that the antibody has the CDRs of antibody YANG-2112.

[1088] In one embodiment, the antibody specifically binds to the RBD of the SARS-CoV-2 spike protein, and the antibody comprises a variable heavy (VH) domain sequence and a variable light (VL) domain sequence and wherein the variable heavy (VH) domain and variable light (VL) domain sequences respectively comprise a sequence having at least 90% identity to the variable heavy (VH) and variable light (VL) domain sequences of antibody YANG-1111, YANG-1102, YANG-1401, YANG-1401a, YANG-1401b, YANG-1401c, YANG-1401d, YANG-1401e, YANG-1402, YANG-1403 or YANG-2112 provided that the antibody has the CDRs of YANG-1111, YANG-1102, YANG-1401, YANG-1401a, YANG-1401b, YANG-1401c, YANG-1401d, YANG-1401e, YANG-1402, YANG-1403 orYANG-2112, respectively.

[1089] In one embodiment, the antibody specifically binds to the RBD of the SARS-CoV-2 spike protein with a KD of 0.1 nM or lower (e.g. as measured by surface plasmon resonance (SPR)), and the antibody comprises a variable heavy (VH) domain sequence and a variable light (VL) domain sequence and wherein the variable heavy (VH) domain and variable light (VL) domain sequences respectively comprise a sequence having at least 90% identity to the variable heavy (VH) and variable light (VL) domain sequences of antibody YANG-1111, YANG-1102, YANG-1401, YANG-1401a, YANG-1401b, YANG-1401c, YANG-1401d, YANG-1401e, YANG-1402, YANG-1403 or YANG-2112 provided that the antibody has the CDRs of antibody YANG-1111, YANG-1102, YANG-1401, YANG-1401a, YANG-1401b, YANG-1401c, YANG-1401d, YANG-1401e, YANG-1402, YANG-1403 or YANG-2112, respectively.

[1090] In one embodiment, the antibody specifically binds to the RBD of the SARS-CoV-2 spike protein and neutralises SARS-CoV-2 with at least 70%, 85%, or 90% neutralisation (e.g. as measured in a pseudovirus neutralisation assay), and

the antibody comprises a variable heavy (VH) domain sequence and a variable light (VL) domain sequence and wherein the variable heavy (VH) domain and variable light (VL) domain sequences respectively comprise a sequence having at least 90% identity to the variable heavy (VH) and variable light (VL) domain sequences of antibody YANG-1111, YANG-1102, YANG-1401, YANG-1401a, YANG-1401b, YANG-1401c, YANG-1401d, YANG-1401e, YANG-1402, YANG-1403 or YANG-2112 provided that the antibody has the CDRs of antibody YANG-1111, YANG-1102, YANG-1401, YANG-1401a, YANG-1401b, YANG-1401c, YANG-1401d, YANG-1401e, YANG-1402, YANG-1403 or YANG-2112, respectively.

[1091] In one embodiment, the antibody specifically binds to the RBD of the SARS-CoV-2 spike protein with a KD of 0.1 nM or lower (e.g. as measured by surface plasmon resonance (SPR)) and neutralises SARS-CoV-2 with at least 70%, 85%, or 90% neutralisation (e.g. as measured in a pseudovirus neutralisation assay), and

the antibody comprises a variable heavy (VH) domain sequence and a variable light (VL) domain sequence and wherein the variable heavy (VH) domain and variable light (VL) domain sequences respectively comprise a sequence having at least 90% identity to the variable heavy (VH) and variable light (VL) domain sequences of antibody YANG-1111, YANG-1102, YANG-1401, YANG-1401a, YANG-1401b, YANG-1401c, YANG-1401d, YANG-1401e, YANG-1402, YANG-1403 or YANG-2112 provided that the antibody has the CDRs of antibody YANG-1111, YANG-1102, YANG-1401, YANG-1401a, YANG-1401b, YANG-1401c, YANG-1401d, YANG-1401e, YANG-1402, YANG-1403 or YANG-2112, respectively.

[1092] In one embodiment, the present invention provides an antibody specifically binds to the RBD of the SARS-CoV-2 spike protein,

wherein the antibody comprises a variable heavy (VH) domain sequence and a variable light (VL) domain sequence and wherein the variable heavy (VH) domain and variable light (VL) domain sequences respectively comprise the variable heavy (VH) and variable light (VL) domain sequences of antibody YANG-1111, YANG-1102, YANG-1401, YANG-1401a, YANG-1401b, YANG-1401c, YANG-1401d, YANG-1401e, YANG-1402, YANG-1403 or YANG-2112.

[1093] An antibody that specifically binds to the receptor binding domain (RBD) of the SARS-CoV-2 spike protein, wherein the antibody comprises the VH and VL domain sequences of antibody YANG-1102.

[1094] An antibody that specifically binds to the receptor binding domain (RBD) of the SARS-CoV-2 spike protein, wherein the antibody comprises the VH and VL domain sequences of antibody YANG-1111.

[1095] An antibody that specifically binds to the receptor binding domain (RBD) of the SARS-CoV-2 spike protein, wherein the antibody comprises the VH and VL domain sequences of antibody YANG-1401.

[1096] An antibody that specifically binds to the receptor binding domain (RBD) of the SARS-CoV-2 spike protein, wherein the antibody comprises the VH and VL domain sequences of antibody YANG-1402.

[1097] An antibody that specifically binds to the receptor binding domain (RBD) of the SARS-CoV-2 spike protein, wherein the antibody comprises the VH and VL domain sequences of antibody YANG-1403.

[1098] An antibody that specifically binds to the receptor binding domain (RBD) of the SARS-CoV-2 spike protein, wherein the antibody comprises the VH and VL domain sequences of antibody YANG-2112.

[1099] In one embodiment, the antibody comprises a variable heavy (VH) domain sequence and a variable light (VL) domain sequence and wherein the variable heavy (VH) domain and variable light (VL) domain sequences respectively comprise the variable heavy (VH) and variable light (VL) domain sequences of antibody YANG-1111, YANG-1102, YANG-1401, YANG-1401a, YANG-1401b, YANG-1401c, YANG-1401d, YANG-1401e, YANG-1402, YANG-1403 or YANG-2112.

[1100] In one embodiment, the antibody comprises the VH and VL domain sequences of antibody YANG-1102.

[1101] In one embodiment, the antibody comprises the VH and VL domain sequences of antibody YANG-1111.

[1102] In one embodiment, the antibody comprises the VH and VL domain sequences of antibody YANG-1401.

[1103] In one embodiment, the antibody comprises the VH and VL domain sequences of antibody YANG-1402.

[1104] In one embodiment, the antibody comprises the VH and VL domain sequences of antibody YANG-1403.

[1105] In one embodiment, the antibody comprises the VH and VL domain sequences of antibody YANG-2112.

[1106] Antibodies are provided which bind to the same epitope on the RBD of the SARS-CoV-2 spike protein as an antibody described anywhere herein.

[1107] An antibody is provided which bind to the same epitope as antibody YANG-1111, YANG-1102, YANG-1401, YANG-1401a, YANG-1401b, YANG-1401c, YANG-1401d, YANG-1401e, YANG-1402, YANG-1403 or YANG-2112, e.g. as defined by its VH and VL sequences.

[1108] An antibody is provided which bind to the same epitope as antibody YANG-1102.

[1109] An antibody is provided which bind to the same epitope as antibody YANG-1111.

[1110] An antibody is provided which bind to the same epitope as antibody YANG-1401.

[1111] An antibody is provided which bind to the same epitope as antibody YANG-1402.

[1112] An antibody is provided which bind to the same epitope as antibody YANG-1403.

[1113] An antibody is provided which bind to the same epitope as antibody YANG-2112.

[1114] An antibody may contact the SARS-CoV-2 spike protein with a footprint that fully or partly overlaps with that of an antibody disclosed anywhere herein. As described elsewhere herein, competition between antibodies may be determined, for example using SPR, and antibodies are provided which compete for binding to the spike protein (compete for binding to their epitope) with an IgG antibody as described anywhere herein.

[1115] An antibody of the present invention may be one which competes for binding to SARS-CoV-2 spike protein with any anti-RBD antibody described herein, such as YANG-1111, YANG-1102, YANG-1401, YANG-1401a, YANG-1401b, YANG-1401c, YANG-1401d, YANG-1401e, YANG-1402, YANG-1403 or YANG-2112, e.g. as defined by its VH and VL sequences.

[1116] An antibody of the present invention may be one which competes for binding to the SARS-CoV-2 spike protein with antibody YANG-1111.

[1117] An antibody of the present invention may be one which competes for binding to the SARS-CoV-2 spike protein with antibody YANG-1102.

[1118] An antibody of the present invention may be one which competes for binding to the SARS-CoV-2 spike protein with antibody YANG-1401.

[1119] An antibody of the present invention may be one which competes for binding to the SARS-CoV-2 spike protein with antibody YANG-1402.

[1120] An antibody of the present invention may be one which competes for binding to the SARS-CoV-2 spike protein with antibody YANG-1403.

[1121] An antibody of the present invention may be one which competes for binding to the SARS-CoV-2 spike protein with antibody YANG-2112.

[1122] In one embodiment, the antibody comprises an antibody VH domain which
[1123] i) is derived from recombination of a human heavy chain V gene segment, a human heavy chain D gene segment and a human heavy chain J gene segment, wherein the V gene segment is IGHV4-4*02, IGHV3-48*02, IGHV3-53*01, IGHV3-33*01 or IGHV1-24*d01; and/or the J gene segment is IGHJ4*02, IGHJ5*02 or IGHJ6*02; or
[1124] ii) comprises framework regions FR1, FR2, FR3 and FR4, wherein FR1 aligns with human germline V gene segment IGHV4-4*02, IGHV3-48*02, IGHV3-53*01, IGHV3-33*01 or IGHV1-24*d01 with up to 1, 2, 3, 4, or 5 amino acid alterations, FR2 aligns with human germline V gene segment IGHV4-4*02, IGHV3-48*02, IGHV3-53*01, IGHV3-33*01 or IGHV1-24*d01 with up to 1, 2, 3, 4, or 5 amino acid alterations, FR3 aligns with human germline V gene segment IGHV4-4*02, IGHV3-48*02, IGHV3-53*01, IGHV3-33*01 or IGHV1-24*d01 with up to 1, 2, 3, 4, or 5 amino acid alterations, and/or FR4 aligns with human germline J gene segment IGHJ4*02, IGHJ5*02 or IGHJ6*02 with up to 1, 2, 3, 4 or 5 amino acid alterations.

[1125] In one embodiment, the antibody comprises an antibody VH domain which
[1126] i) is derived from recombination of a human heavy chain V gene segment IGHV4-4*02, IGHV3-48*02, IGHV3-53*01, IGHV3-33*01 or IGHV1-24*d01, a human heavy chain D gene segment and a human heavy chain J gene segment, or
[1127] ii) comprises framework regions FR1, FR2, FR3 and FR4, wherein FR1, FR2 and FR3 each align with human germline V segment IGHV4-4*02, IGHV3-48*02, IGHV3-53*01, IGHV3-33*01 or IGHV1-24*d01 with up to 1, 2, 3, 4 or 5 amino acid alterations.

[1128] In one embodiment, the J gene segment is IGHJ4*02, IGHJ5*02 or IGHJ6*02, or the VH domain framework region FR4 aligns with human germline J gene segment IGHJ4*02, IGHJ5*02 or IGHJ6*02 with 1, 2, 3, 4 or 5 amino acid alterations.

[1129] In one embodiment, the antibody comprises an antibody VL domain which
[1130] i) is derived from recombination of a human light chain V gene segment and a human light chain J gene segment, wherein the V gene segment is IGLV1-40*01, IGLV3-21*d01, IGKV1D-16*01, IGKV1-9*d01, IGKV1D-17*01 or IGLV1-47*01; and/or the J gene segment is IGLJ3*02, IGLJ2*01, IGKJ4*01 or IGKJ1*01; or
[1131] ii) comprises framework regions FR1, FR2, FR3 and FR4, wherein FR1 aligns with human germline V gene segment IGLV1-40*01, IGLV3-21*d01, IGKV1D-16*01, IGKV1-9*d01, IGKV1D-17*01 or IGLV1-47*01 with up to 1, 2, 3, 4, or 5 amino acid alterations, FR2 aligns with human germline V gene segment IGLV1-40*01, IGLV3-21*d01, IGKV1D-16*01, IGKV1-9*d01, IGKV1D-17*01 or IGLV1-47*01 with up to 1, 2, 3, 4, or 5 amino acid alterations FR3 aligns with human germline V gene segment IGLV1-40*01, IGLV3-21*d01, IGKV1D-16*01, IGKV1-9*d01, IGKV1D-17*01 or IGLV1-47*01 with up to 1, 2, 3, 4 or 5 amino acid alterations, and/or FR4 aligns with human germline J gene segment IGLJ3*02, IGLJ2*01, IGKJ4*01 or IGKJ1*01 with up to 1, 2, 3, 4 or 5 amino acid alterations.

[1132] In one embodiment, the antibody comprises an antibody VL domain derived from recombination of a human light chain V gene segment and a human light chain J gene segment, wherein: the V gene segment is IGLV1-40*01, IGLV3-21*d01, IGKV1D-16*01, IGKV1-9*d01, IGKV1D-17*01 or IGLV1-47*01, and optionally the J gene segment is IGLJ3*02, IGLJ2*01, IGKJ4*01 or IGKJ1*01.

[1133] Example combinations of v and j gene segments for heavy and light chain variable domains are shown in Table 3, and these represent preferred combinations. The heavy and light chain variable domains may optionally be derived from the v and j gene segments identified in Table 3 for any one individual YANG antibody.

### Group E—NTD Binders

[1134] According to a fifth aspect of the invention, antibodies are provided herein which specifically binds to the N-terminal domain (NTD) of the S1 subunit of the SARS-CoV-2 spike protein. For example, antibodies YANG-1301, YANG-1302, YANG-1303, YANG-1304, YANG-1305; YANG-2301, YANG-2302, YANG-2303, YANG-2304, YANG-2305, and YANG-2306 as exemplified herein have been found to specifically bind to the N-terminal domain (NTD) of the S1 subunit of the SARS-CoV-2 spike protein.

[1135] In a first aspect, the present invention provides an antibody that specifically binds to the N-terminal domain (NTD) of the S1 subunit of the SARS-CoV-2 spike protein.

[1136] In one embodiment, the antibody specifically binds the N-terminal domain (NTD) of the S1 subunit of the SARS-CoV-2 spike protein with a KD of 0.1 nM or lower (e.g. as measured by surface plasmon resonance (SPR)).

[1137] In one embodiment, the antibody is a neutralising antibody.

[1138] In one embodiment, the antibody neutralises SARS-CoV-2 with an IC50 of 5.5 nM or lower (e.g. as measured in a pseudovirus neutralisation assay).

[1139] In one embodiment, the antibody specifically binds the N-terminal domain (NTD) of the S1 subunit of the SARS-CoV-2 spike protein with a KD of 0.1 nM or lower (e.g. as measured by surface plasmon resonance (SPR)) and the antibody neutralises SARS-CoV2 with an IC50 of 5.5 nM or lower (e.g. as measured in a pseudovirus neutralisation assay).

[1140] In one embodiment, the antibody comprises a variable heavy (VH) domain sequence comprising complementarity determining regions (CDRs) HCDR1, HCDR2 and HCDR3, and a variable light (VL) domain sequence comprising complementarity determining regions LCDR1, LCDR2 and LCDR3, wherein the HCDR3 is the HCDR3 of antibody YANG-1301, YANG-1302, YANG-1303, YANG-1304, YANG-1305; YANG-2301, YANG-2302, YANG-2303, YANG-2304, YANG-2305, or YANG-2306.

[1141] In one embodiment, HCDR3 is the HCDR3 of antibody YANG-1301.

[1142] In one embodiment, HCDR3 is the HCDR3 of antibody YANG-1302.

[1143] In one embodiment, HCDR3 is the HCDR3 of antibody YANG-1303.

[1144] In one embodiment, HCDR3 is the HCDR3 of antibody YANG-1304.

[1145] In one embodiment, HCDR3 is the HCDR3 of antibody YANG-1305.

[1146] In one embodiment, HCDR3 is the HCDR3 of antibody YANG-2301.

[1147] In one embodiment, HCDR3 is the HCDR3 of antibody YANG-2302.

[1148] In one embodiment, HCDR3 is the HCDR3 of antibody YANG-2303.

[1149] In one embodiment, HCDR3 is the HCDR3 of antibody YANG-2304.

[1150] In one embodiment, HCDR3 is the HCDR3 of antibody YANG-2305.

[1151] In one embodiment, HCDR3 is the HCDR3 of antibody YANG-2306.

[1152] In one embodiment, the antibody specifically binds the N-terminal domain (NTD) of the S1 subunit of the SARS-CoV-2 spike protein with a KD of 0.1 nM or lower (e.g. as measured by surface plasmon resonance (SPR)) and HCDR3 is the HCDR3 of antibody YANG-1301, YANG-1302, YANG-1303, YANG-1304, YANG-1305; YANG-2301, YANG-2302, YANG-2303, YANG-2304, YANG-2305, or YANG-2306.

[1153] In one embodiment, the antibody neutralises SARS-CoV-2 with an IC50 of 5.5 nM or lower (e.g. as measured in a pseudovirus neutralisation assay) and HCDR3 is the HCDR3 of antibody YANG-1301, YANG-1302, YANG-1303, YANG-1304, YANG-1305; YANG-2301, YANG-2302, YANG-2303, YANG-2304, YANG-2305, or YANG-2306.

[1154] In one embodiment, the antibody specifically binds the N-terminal domain (NTD) of the S1 subunit of the SARS-CoV-2 spike protein with a KD of 0.1 nM or lower (e.g. as measured by surface plasmon resonance (SPR)) and neutralises SARS-CoV-2 with an IC50 of 5.5 nM or lower (e.g. as measured in a pseudovirus neutralisation assay), and HCDR3 is the HCDR3 of antibody YANG-1301, YANG-1302, YANG-1303, YANG-1304, YANG-1305; YANG-2301, YANG-2302, YANG-2303, YANG-2304, YANG-2305, or YANG-2306.

[1155] In one embodiment, the present invention provides an anti-SARS-CoV-2 antibody, wherein the antibody comprises a variable heavy (VH) domain sequence comprising complementarity determining regions (CDRs) HCDR1, HCDR2, and HCDR3, and a variable light (VL) domain sequence comprising complementarity determining regions LCDR1, LCDR2 and LCDR3, wherein the CDRs are those of antibody YANG-1301, YANG-1302, YANG-1303, YANG-1304, YANG-1305; YANG-2301, YANG-2302, YANG-2303, YANG-2304, YANG-2305, or YANG-2306.

[1156] In one embodiment, the antibody has the CDRs of antibody YANG-1301.

[1157] In one embodiment, the antibody has the CDRs of antibody YANG-1302.

[1158] In one embodiment, the antibody has the CDRs of antibody YANG-1303.

[1159] In one embodiment, the antibody has the CDRs of antibody YANG-1304.

[1160] In one embodiment, the antibody has the CDRs of antibody YANG-1305.

[1161] In one embodiment, the antibody has the CDRs of antibody YANG-2301.

[1162] In one embodiment, the antibody has the CDRs of antibody YANG-2302.

[1163] In one embodiment, the antibody has the CDRs of antibody YANG-2303.

[1164] In one embodiment, the antibody has the CDRs of antibody YANG-2304.

[1165] In one embodiment, the antibody has the CDRs of antibody YANG-2305.

[1166] In one embodiment, the antibody has the CDRs of antibody YANG-2306.

[1167] In one embodiment, the present invention provides an anti-SARS-CoV-2 antibody, wherein the antibody specifically binds the N-terminal domain (NTD) of the S1 subunit ofthe SARS-CoV-2 spike protein with a KD of 0.1 nM or lower (e.g. as measured by surface plasmon resonance (SPR)), and wherein the antibody comprises a variable heavy (VH) domain sequence comprising complementarity determining regions (CDRs) HCDR1, HCDR2, and HCDR3, and a variable light (VL) domain sequence comprising complementarity determining regions LCDR1, LCDR2 and LCDR3, wherein the CDRs are those of antibody YANG-1301, YANG-1302, YANG-1303, YANG-1304, YANG-1305; YANG-2301, YANG-2302, YANG-2303, YANG-2304, YANG-2305, or YANG-2306.

[1168] In one embodiment, the present invention provides an anti-SARS-CoV-2 antibody, wherein the antibody neutralises SARS-CoV-2 with an IC50 of 5.5 nM or lower (e.g. as measured in a pseudovirus neutralisation assay), and wherein the antibody comprises a variable heavy (VH) domain sequence comprising complementarity determining regions (CDRs) HCDR1, HCDR2, and HCDR3, and a variable light (VL) domain sequence comprising complementarity determining regions LCDR1, LCDR2 and LCDR3, wherein the CDRs are those of antibody YANG-1301, YANG-1302, YANG-1303, YANG-1304, YANG-1305; YANG-2301, YANG-2302, YANG-2303, YANG-2304, YANG-2305, or YANG-2306.

[1169] In one embodiment, the present invention provides an anti-SARS-CoV-2 antibody, wherein the antibody specifically binds the N-terminal domain (NTD) of the S1 subunit ofthe SARS-CoV-2 spike protein with a KD of 0.1 nM or lower (e.g. as measured by surface plasmon resonance (SPR)) and neutralises SARS-CoV-2 with an IC50 of 5.5 nM or lower (e.g. as measured in a pseudovirus neutralisation assay), and wherein the antibody comprises a variable heavy (VH) domain sequence comprising complementarity determining regions (CDRs) HCDR1, HCDR2, and HCDR3, and a variable light (VL) domain sequence comprising complementarity determining regions LCDR1, LCDR2 and LCDR3, wherein the CDRs are those of antibody YANG-1301, YANG-1302, YANG-1303, YANG-1304, YANG-1305; YANG-2301, YANG-2302, YANG-2303, YANG-2304, YANG-2305, or YANG-2306.

[1170] In one embodiment, the antibody comprises a variable heavy (VH) domain sequence and a variable light (VL) domain sequence and wherein the variable heavy (VH) domain and variable light (VL) domain sequences respectively comprise the variable heavy (VH) domain and variable light (VL) domain sequences of antibody YANG-1301, YANG-1302, YANG-1303, YANG-1304, YANG-1305; YANG-2301, YANG-2302, YANG-2303, YANG-2304, YANG-2305, or YANG-2306, optionally with 1, 2, 3, 4 or 5 amino acid alterations outside the complementarity determining regions (CDRs) in the variable heavy (VH) domain sequence and optionally with 1, 2, 3, 4 or 5 amino acid alterations outside the complementarity determining regions (CDRs) in the variable light (VL) domain sequence.

[1171] In one embodiment, the antibody comprises a variable heavy (VH) domain sequence and a variable light (VL) domain sequence and wherein the variable heavy (VH) domain and variable light (VL) domain sequences respectively comprise the variable heavy (VH) domain and variable light (VL) domain sequences of antibody YANG-1301, YANG-1302, YANG-1303, YANG-1304, YANG-1305; YANG-2301, YANG-2302, YANG-2303, YANG-2304, YANG-2305, or YANG-2306, optionally with 1, 2, 3, 4 or 5 amino acid alterations outside the complementarity determining regions (CDRs) in the variable heavy (VH) domain sequence and optionally with 1, 2, 3, 4 or 5 amino acid alterations outside the complementarity determining regions (CDRs) in the variable light (VL) domain sequence.

[1172] In one embodiment, the antibody comprises a variable heavy (VH) domain sequence of antibody YANG-1301, optionally with 1, 2, 3, 4 or 5 amino acid alterations outside the complementarity determining regions (CDRs), and a variable light (VL) domain sequence of antibody YANG-1301, optionally with 1, 2, 3, 4 or 5 amino acid alterations outside the complementarity determining regions (CDRs).

[1173] In one embodiment, the antibody comprises a variable heavy (VH) domain sequence of antibody YANG-1302, optionally with 1, 2, 3, 4 or 5 amino acid alterations outside the complementarity determining regions (CDRs), and a variable light (VL) domain sequence of antibody YANG-1302, optionally with 1, 2, 3, 4 or 5 amino acid alterations outside the complementarity determining regions (CDRs).

[1174] In one embodiment, the antibody comprises a variable heavy (VH) domain sequence of antibody YANG-1303, optionally with 1, 2, 3, 4 or 5 amino acid alterations outside the complementarity determining regions (CDRs), and a variable light (VL) domain sequence of antibody YANG-1303, optionally with 1, 2, 3, 4 or 5 amino acid alterations outside the complementarity determining regions (CDRs).

[1175] In one embodiment, the antibody comprises a variable heavy (VH) domain sequence of antibody YANG-1304, optionally with 1, 2, 3, 4 or 5 amino acid alterations outside the complementarity determining regions (CDRs), and a variable light (VL) domain sequence of antibody YANG-1304, optionally with 1, 2, 3, 4 or 5 amino acid alterations outside the complementarity determining regions (CDRs).

[1176] In one embodiment, the antibody comprises a variable heavy (VH) domain sequence of antibody YANG-1305, optionally with 1, 2, 3, 4 or 5 amino acid alterations outside the complementarity determining regions (CDRs), and a variable light (VL) domain sequence of antibody YANG-1305, optionally with 1, 2, 3, 4 or 5 amino acid alterations outside the complementarity determining regions (CDRs).

[1177] In one embodiment, the antibody comprises a variable heavy (VH) domain sequence of antibody YANG-2301, optionally with 1, 2, 3, 4 or 5 amino acid alterations outside the complementarity determining regions (CDRs), and a variable light (VL) domain sequence of antibody YANG-2301, optionally with 1, 2, 3, 4 or 5 amino acid alterations outside the complementarity determining regions (CDRs).

[1178] In one embodiment, the antibody comprises a variable heavy (VH) domain sequence of antibody YANG-2302, optionally with 1, 2, 3, 4 or 5 amino acid alterations outside the complementarity determining regions (CDRs), and a variable light (VL) domain sequence of antibody YANG-2302, optionally with 1, 2, 3, 4 or 5 amino acid alterations outside the complementarity determining regions (CDRs).

[1179] In one embodiment, the antibody comprises a variable heavy (VH) domain sequence of antibody YANG-2303, optionally with 1, 2, 3, 4 or 5 amino acid alterations outside the complementarity determining regions (CDRs), and a variable light (VL) domain sequence of antibody YANG-2303, optionally with 1, 2, 3, 4 or 5 amino acid alterations outside the complementarity determining regions (CDRs).

[1180] In one embodiment, the antibody comprises a variable heavy (VH) domain sequence of antibody YANG-2304, optionally with 1, 2, 3, 4 or 5 amino acid alterations outside the complementarity determining regions (CDRs), and a variable light (VL) domain sequence of antibody YANG-2304, optionally with 1, 2, 3, 4 or 5 amino acid alterations outside the complementarity determining regions (CDRs).

[1181] In one embodiment, the antibody comprises a variable heavy (VH) domain sequence of antibody YANG-2305, optionally with 1, 2, 3, 4 or 5 amino acid alterations outside the complementarity determining regions (CDRs), and a variable light (VL) domain sequence of antibody YANG-2305, optionally with 1, 2, 3, 4 or 5 amino acid alterations outside the complementarity determining regions (CDRs).

[1182] In one embodiment, the antibody comprises a variable heavy (VH) domain sequence of antibody YANG-2306, optionally with 1, 2, 3, 4 or 5 amino acid alterations outside the complementarity determining regions (CDRs), and a variable light (VL) domain sequence of antibody YANG-2306, optionally with 1, 2, 3, 4 or 5 amino acid alterations outside the complementarity determining regions (CDRs).

[1183] In one embodiment, the antibody specifically binds the N-terminal domain (NTD) of the S1 subunit of the SARS-CoV-2 spike protein with a KD of 0.1 nM or lower (e.g. as measured by surface plasmon resonance (SPR)), and the variable heavy (VH) domain and variable light (VL) domain sequences respectively comprise the variable heavy (VH) domain and variable light (VL) domain sequences of antibody YANG-1301, YANG-1302, YANG-1303, YANG-1304, YANG-1305; YANG-2301, YANG-2302, YANG-2303, YANG-2304, YANG-2305, or YANG-2306, optionally with 1, 2, 3, 4 or 5 amino acid alterations outside the complementarity determining regions (CDRs) in the variable heavy (VH) domain sequence and optionally with 1, 2, 3, 4 or 5 amino acid alterations outside the complementarity determining regions (CDRs) in the variable light (VL) domain sequence.

[1184] In one embodiment, the antibody neutralises SARS-CoV-2 with an IC50 of 5.5 nM or lower (e.g. as measured in a pseudovirus neutralisation assay), and and the variable heavy (VH) domain and variable light (VL) domain sequences respectively comprise the variable heavy (VH) domain and variable light (VL) domain sequences of antibody YANG-1301, YANG-1302, YANG-1303, YANG-1304, YANG-1305; YANG-2301, YANG-2302, YANG-2303, YANG-2304, YANG-2305, or YANG-2306, optionally with 1, 2, 3, 4 or 5 amino acid alterations outside the complementarity determining regions (CDRs) in the variable heavy (VH) domain sequence and optionally with 1, 2, 3, 4 or 5 amino acid alterations outside the complementarity determining regions (CDRs) in the variable light (VL) domain sequence.

[1185] In one embodiment, the antibody specifically binds the N-terminal domain (NTD) of the S1 subunit of the SARS-CoV-2 spike protein with a KD of 0.1 nM or lower (e.g. as measured by surface plasmon resonance (SPR)) and neutralises SARS-CoV-2 with an IC50 of 5.5 nM or lower (e.g. as measured in a pseudovirus neutralisation assay), and and the variable heavy (VH) domain and variable light (VL) domain sequences respectively comprise the variable heavy (VH) domain and variable light (VL) domain sequences of antibody YANG-1301, YANG-1302, YANG-1303, YANG-1304, YANG-1305; YANG-2301, YANG-2302, YANG-2303, YANG-2304, YANG-2305, or YANG-2306, optionally with 1, 2, 3, 4 or 5 amino acid alterations outside the complementarity determining regions (CDRs) in the variable heavy (VH) domain sequence and optionally with 1, 2, 3, 4 or 5 amino acid alterations outside the complementarity determining regions (CDRs) in the variable light (VL) domain sequence.

[1186] In one embodiment, the antibody comprises a variable heavy (VH) domain sequence and a variable light (VL) domain sequence and wherein the variable heavy (VH) domain and variable light (VL) domain sequences respectively comprise a sequence having at least 90% identity to the variable heavy (VH) and variable light (VL) domain sequences of antibody YANG-1301, YANG-1302, YANG-1303, YANG-1304, YANG-1305; YANG-2301, YANG-2302, YANG-2303, YANG-2304, YANG-2305, or YANG-2306 provided that the antibody has the CDRs of antibody YANG-1301, YANG-1302, YANG-1303, YANG-1304, YANG-1305; YANG-2301, YANG-2302, YANG-2303, YANG-2304, YANG-2305, or YANG-2306, respectively.

[1187] In one embodiment, the variable heavy (VH) domain sequence comprises a sequence having at least 90% identity to the VH domain sequence of antibody YANG-1301 and the variable light (VL) domain sequence comprises a sequence having at least 90% identity to the VL domain sequence of antibody YANG-1301, provided that the antibody has the CDRs of antibody YANG-1301.

[1188] In one embodiment, the variable heavy (VH) domain sequence comprises a sequence having at least 90% identity to the VH domain sequence of antibody YANG-1302 and the variable light (VL) domain sequence comprises a sequence having at least 90% identity to the VL domain sequence of antibody YANG-1302, provided that the antibody has the CDRs of antibody YANG-1302.

[1189] In one embodiment, the variable heavy (VH) domain sequence comprises a sequence having at least 90% identity to the VH domain sequence of antibody YANG-1303 and the variable light (VL) domain sequence comprises a sequence having at least 90% identity to the VL domain sequence of antibody YANG-1303, provided that the antibody has the CDRs of antibody YANG-1303.

[1190] In one embodiment, the variable heavy (VH) domain sequence comprises a sequence having at least 90% identity to the VH domain sequence of antibody YANG-1304 and the variable light (VL) domain sequence comprises a sequence having at least 90% identity to the VL domain sequence of antibody YANG-1304, provided that the antibody has the CDRs of antibody YANG-1304.

[1191] In one embodiment, the variable heavy (VH) domain sequence comprises a sequence having at least 90% identity to the VH domain sequence of antibody YANG-1305 and the variable light (VL) domain sequence comprises a sequence having at least 90% identity to the VL domain sequence of antibody YANG-1305, provided that the antibody has the CDRs of antibody YANG-1305.

[1192] In one embodiment, the variable heavy (VH) domain sequence comprises a sequence having at least 90% identity to the VH domain sequence of antibody YANG-2301 and the variable light (VL) domain sequence comprises a sequence having at least 90% identity to the VL domain sequence of antibody YANG-2301, provided that the antibody has the CDRs of antibody YANG-2301.

[1193] In one embodiment, the variable heavy (VH) domain sequence comprises a sequence having at least 90% identity to the VH domain sequence of antibody YANG-2302 and the variable light (VL) domain sequence comprises a sequence having at least 90% identity to the VL domain sequence of antibody YANG-2302, provided that the antibody has the CDRs of antibody YANG-2302.

[1194] In one embodiment, the variable heavy (VH) domain sequence comprises a sequence having at least 90% identity to the VH domain sequence of antibody YANG-2303 and the variable light (VL) domain sequence comprises a sequence having at least 90% identity to the VL domain sequence of antibody YANG-2303, provided that the antibody has the CDRs of antibody YANG-2303.

[1195] In one embodiment, the variable heavy (VH) domain sequence comprises a sequence having at least 90% identity to the VH domain sequence of antibody YANG-2304 and the variable light (VL) domain sequence comprises a sequence having at least 90% identity to the VL domain sequence of antibody YANG-2304, provided that the antibody has the CDRs of antibody YANG-2304.

[1196] In one embodiment, the variable heavy (VH) domain sequence comprises a sequence having at least 90% identity to the VH domain sequence of antibody YANG-2305 and the variable light (VL) domain sequence comprises a sequence having at least 90% identity to the VL domain sequence of antibody YANG-2305, provided that the antibody has the CDRs of antibody YANG-2305.

[1197] In one embodiment, the variable heavy (VH) domain sequence comprises a sequence having at least 90% identity to the VH domain sequence of antibody YANG-2306 and the variable light (VL) domain sequence comprises a sequence having at least 90% identity to the VL domain sequence of antibody YANG-2306, provided that the antibody has the CDRs of antibody YANG-2306.

[1198] In one embodiment, the antibody specifically binds the N-terminal domain (NTD) of the S 1 subunit of the SARS-CoV-2 spike protein with a KD of 0.1 nM or lower (e.g. as measured by surface plasmon resonance (SPR)), and and the antibody comprises a variable heavy (VH) domain sequence and a variable light (VL) domain sequence and wherein the variable heavy (VH) domain and variable light (VL) domain sequences respectively comprise a sequence having at least 90% identity to the variable heavy (VH) and variable light (VL) domain sequences of antibody YANG-1301, YANG-1302, YANG-1303, YANG-1304, YANG-1305; YANG-2301, YANG-2302, YANG-2303, YANG-2304, YANG-2305, or YANG-2306, provided that the antibody has the CDRs of antibody YANG-1301, YANG-1302, YANG-1303, YANG-1304, YANG-1305; YANG-2301, YANG-2302, YANG-2303, YANG-2304, YANG-2305, or YANG-2306, respectively.

[1199] In one embodiment, the antibody neutralises SARS-CoV-2 with an IC50 of 5.5 nM or lower (e.g. as measured in a pseudovirus neutralisation assay), and and the antibody comprises a variable heavy (VH) domain sequence and a variable light (VL) domain sequence and wherein the variable heavy (VH) domain and variable light (VL) domain sequences respectively comprise a sequence having at least 90% identity to the variable heavy (VH) and variable light (VL) domain sequences of antibody YANG-1301, YANG-1302, YANG-1303, YANG-1304, YANG-1305; YANG-2301, YANG-2302, YANG-2303, YANG-2304, YANG-2305, or YANG-2306, provided that the antibody has the CDRs of antibody YANG-1301, YANG-1302, YANG-1303, YANG-1304, YANG-1305; YANG-2301, YANG-2302, YANG-2303, YANG-2304, YANG-2305, or YANG-2306, respectively.

[1200] In one embodiment, the antibody specifically binds the N-terminal domain (NTD) of the S1 subunit of the SARS-CoV-2 spike protein with a KD of 0.1 nM or lower (e.g. as measured by surface plasmon resonance (SPR)) and neutralises SARS-CoV-2 with an IC50 of 5.5 nM or lower (e.g. as measured in a pseudovirus neutralisation assay), and and the antibody comprises a variable heavy (VH) domain sequence and a variable light (VL) domain sequence and wherein the variable heavy (VH) domain and variable light (VL) domain sequences respectively comprise a sequence having at least 90% identity to the variable heavy (VH) and variable light (VL) domain sequences of antibody YANG-1301, YANG-1302, YANG-1303, YANG-1304, YANG-1305; YANG-2301, YANG-2302, YANG-2303, YANG-2304, YANG-2305, or YANG-2306, provided that the antibody has the CDRs of antibody YANG-1301, YANG-1302, YANG-1303, YANG-1304, YANG-1305; YANG-2301, YANG-2302, YANG-2303, YANG-2304, YANG-2305, or YANG-2306, respectively.

[1201] In one embodiment, the present invention provides an antibody that specifically binds to the N-terminal domain (NTD) of the S1 subunit of the SARS-CoV-2 spike protein, wherein the antibody comprises a variable heavy (VH) domain sequence and a variable light (VL) domain sequence and wherein the variable heavy (VH) domain and variable light (VL) domain sequences respectively comprise the variable heavy (VH) and variable light (VL) domain sequences of antibody YANG-1301, YANG-1302, YANG-1303, YANG-1304, YANG-1305; YANG-2301, YANG-2302, YANG-2303, YANG-2304, YANG-2305, or YANG-2306.

[1202] In one embodiment, the antibody specifically binds to the N-terminal domain (NTD) of the S1 subunit of the SARS-CoV-2 spike protein, wherein the antibody comprises the VH and VL domain sequences of antibody YANG-1301.

[1203] In one embodiment, the antibody specifically binds to the N-terminal domain (NTD) of the S1 subunit of the SARS-CoV-2 spike protein, wherein the antibody comprises the VH and VL domain sequences of antibody YANG-1302.

[1204] In one embodiment, the antibody specifically binds to the N-terminal domain (NTD) of the S1 subunit of the SARS-CoV-2 spike protein, wherein the antibody comprises the VH and VL domain sequences of antibody YANG-1303.

[1205] In one embodiment, the antibody specifically binds to the N-terminal domain (NTD) of the S1 subunit of the SARS-CoV-2 spike protein, wherein the antibody comprises the VH and VL domain sequences of antibody YANG-1304.

[1206] In one embodiment, the antibody specifically binds to the N-terminal domain (NTD) of the S1 subunit of the SARS-CoV-2 spike protein, wherein the antibody comprises the VH and VL domain sequences of antibody YANG-1305.

[1207] In one embodiment, the antibody specifically binds to the N-terminal domain (NTD) of the S1 subunit of the SARS-CoV-2 spike protein, wherein the antibody comprises the VH and VL domain sequences of antibody YANG-2301.

[1208] In one embodiment, the antibody specifically binds to the N-terminal domain (NTD) of the S1 subunit of the SARS-CoV-2 spike protein, wherein the antibody comprises the VH and VL domain sequences of antibody YANG-2302.

[1209] In one embodiment, the antibody specifically binds to the N-terminal domain (NTD) of the S1 subunit of the SARS-CoV-2 spike protein, wherein the antibody comprises the VH and VL domain sequences of antibody YANG-2303.

[1210] In one embodiment, the antibody specifically binds to the N-terminal domain (NTD) of the S1 subunit of the SARS-CoV-2 spike protein, wherein the antibody comprises the VH and VL domain sequences of antibody YANG-2304.

[1211] In one embodiment, the antibody specifically binds to the N-terminal domain (NTD) of the S1 subunit of the SARS-CoV-2 spike protein, wherein the antibody comprises the VH and VL domain sequences of antibody YANG-2305.

[1212] In one embodiment, the antibody specifically binds to the N-terminal domain (NTD) of the S1 subunit of the SARS-CoV-2 spike protein, wherein the antibody comprises the VH and VL domain sequences of antibody YANG-2306.

[1213] In one embodiment, the antibody comprises a variable heavy (VH) domain sequence and a variable light (VL) domain sequence and wherein the variable heavy (VH) domain and variable light (VL) domain sequences respectively comprise the variable heavy (VH) and variable light (VL) domain sequences of antibody YANG-1301, YANG-1302, YANG-1303, YANG-1304, YANG-1305; YANG-2301, YANG-2302, YANG-2303, YANG-2304, YANG-2305, or YANG-2306.

[1214] In one embodiment, the antibody comprises the VH and VL domain sequences of antibody YANG-1301.

[1215] In one embodiment, the antibody comprises the VH and VL domain sequences of antibody YANG-1302.

[1216] In one embodiment, the antibody comprises the VH and VL domain sequences of antibody YANG-1303.

[1217] In one embodiment, the antibody comprises the VH and VL domain sequences of antibody YANG-1304.

[1218] In one embodiment, the antibody comprises the VH and VL domain sequences of antibody YANG-1305.

[1219] In one embodiment, the antibody comprises the VH and VL domain sequences of antibody YANG-2301.

[1220] In one embodiment, the antibody comprises the VH and VL domain sequences of antibody YANG-2302.

[1221] In one embodiment, the antibody comprises the VH and VL domain sequences of antibody YANG-2303.

[1222] In one embodiment, the antibody comprises the VH and VL domain sequences of antibody YANG-2304.

[1223] In one embodiment, the antibody comprises the VH and VL domain sequences of antibody YANG-2305.

[1224] In one embodiment, the antibody comprises the VH and VL domain sequences of antibody YANG-2306.

[1225] Antibodies are provided which bind to the same epitope on the N-terminal domain (NTD) of the S1 subunit of the SARS-CoV-2 spike protein as an antibody described anywhere herein.

[1226] An antibody is provided which bind to the same epitope as antibody YANG-1301, YANG-1302, YANG-1303, YANG-1304, YANG-1305; YANG-2301, YANG-2302, YANG-2303, YANG-2304, YANG-2305, or YANG-2306, e.g. as defined by its VH and VL sequences.

[1227] In one embodiment, an antibody is provided which binds to the same epitope as antibody YANG-1301.

[1228] In one embodiment, an antibody is provided which binds to the same epitope as antibody YANG-1302.

[1229] In one embodiment, an antibody is provided which binds to the same epitope as antibody YANG-1303.

[1230] In one embodiment, an antibody is provided which binds to the same epitope as antibody YANG-1304.

[1231] In one embodiment, an antibody is provided which binds to the same epitope as antibody YANG-1305.

[1232] In one embodiment, an antibody is provided which binds to the same epitope as antibody YANG-2301.

[1233] In one embodiment, an antibody is provided which binds to the same epitope as antibody YANG-2302.

[1234] In one embodiment, an antibody is provided which binds to the same epitope as antibody YANG-2303.

[1235] In one embodiment, an antibody is provided which binds to the same epitope as antibody YANG-2304.

[1236] In one embodiment, an antibody is provided which binds to the same epitope as antibody YANG-2305.

[1237] In one embodiment, an antibody is provided which binds to the same epitope as antibody YANG-2306.

[1238] An antibody may contact the SARS-CoV-2 spike protein with a footprint that fully or partly overlaps with that of an antibody disclosed anywhere herein. As described elsewhere herein, competition between antibodies may be determined, for example using SPR, and antibodies are provided which compete for binding to the spike protein (compete for binding to their epitope) with an IgG antibody as described anywhere herein.

[1239] An antibody of the present invention may be one which competes for binding to SARS-CoV-2 spike protein with any anti-NTD antibody described herein, such as YANG-1301, YANG-1302, YANG-1303, YANG-1304, YANG-1305; YANG-2301, YANG-2302, YANG-2303, YANG-2304, YANG-2305, or YANG-2306, e.g. as defined by its VH and VL sequences.

[1240] An antibody of the present invention may be one which competes for binding to the SARS-CoV-2 spike protein with antibody YANG-1301.

[1241] An antibody of the present invention may be one which competes for binding to the SARS-CoV-2 spike protein with antibody YANG-1302.

[1242] An antibody of the present invention may be one which competes for binding to the SARS-CoV-2 spike protein with any antibody YANG-1303.

[1243] An antibody of the present invention may be one which competes for binding to the SARS-CoV-2 spike protein with antibody YANG-1304.

[1244] An antibody of the present invention may be one which competes for binding to the SARS-CoV-2 spike protein with antibody YANG-1305.

[1245] An antibody of the present invention may be one which competes for binding to the SARS-CoV-2 spike protein with antibody YANG-2301.

[1246] An antibody of the present invention may be one which competes for binding to the SARS-CoV-2 spike protein with antibody YANG-2302.

[1247] An antibody of the present invention may be one which competes for binding to the SARS-CoV-2 spike protein with antibody YANG-2303.

[1248] An antibody of the present invention may be one which competes for binding to the SARS-CoV-2 spike protein with antibody YANG-2304.

[1249] An antibody of the present invention may be one which competes for binding to the SARS-CoV-2 spike protein with antibody YANG-2305.

[1250] An antibody of the present invention may be one which competes for binding to the SARS-CoV-2 spike protein with antibody YANG-2306.

[1251] In one embodiment, the antibody comprises VH and/or VL domain framework regions of human germline gene segment sequences.

[1252] In one embodiment, the antibody comprises an antibody VH domain which
[1253] i) is derived from recombination of a human heavy chain V gene segment, a human heavy chain D gene segment and a human heavy chain J gene segment, wherein the V gene segment is IGHV3-33*01, IGHV1-18*01, IGHV4-34*01, IGHV3-30*18 orIGHV1-24*d01; and/or the J gene segment is IGHJ5*02, IGHJ4*02 or IGHJ6*02; or
[1254] ii) comprises framework regions FR1, FR2, FR3 and FR4, wherein FR1 aligns with human germline V gene segment IGHV3-33*01, IGHV1-18*01, IGHV4-34*01, IGHV3-30*18 or IGHV1-24*d01 with up to 1, 2, 3, 4, or 5 amino acid alterations, FR2 aligns with human germline V gene segment IGHV3-33*01, IGHV1-18*01, IGHV4-34*01, IGHV3-30*18 or IGHV1-24*d01 with up to 1, 2, 3, 4, or 5 amino acid alterations, FR3 aligns with human germline V gene segment IGHV3-33*01, IGHV1-18*01, IGHV4-34*01, IGHV3-30*18 or IGHV1-24*d01 with up to 1, 2, 3, 4, or 5 amino acid alterations, and/or FR4 aligns with human germline J gene segment IGHJ5*02, IGHJ4*02 or IGHJ6*02 with up to 1, 2, 3, 4 or 5 amino acid alterations.

[1255] In one embodiment, the antibody comprises an antibody VH domain which
[1256] i) is derived from recombination of a human heavy chain V gene segment IGHV3-33*01, IGHV1-18*01, IGHV4-34*01, IGHV3-30*18 or IGHV1-24*d01, a human heavy chain D gene segment and a human heavy chain J gene segment, or
[1257] ii) comprises framework regions FR1, FR2, FR3 and FR4, wherein FR1, FR2 and FR3 each align with human germline V segment IGHV3-33*01, IGHV1-18*01, IGHV4-34*01, IGHV3-30*18 or IGHV1-24*d01 with up to 1, 2, 3, 4 or 5 amino acid alterations.

[1258] In one embodiment, the J gene segment is IGHJ5*02, IGHJ4*02 or IGHJ6*02, or the VH domain framework region FR4 aligns with human germline J gene segment IGHJ5*02, IGHJ4*02 or IGHJ6*02 with 1, 2, 3, 4 or 5 amino acid alterations.

[1259] In one embodiment, the antibody comprises an antibody VL domain which
[1260] i) is derived from recombination of a human light chain V gene segment and a human light chain J gene segment, wherein
   [1261] the V gene segment is IGLV3-1*01, IGLV3-10*01, IGKV1-27*01, IGKV3-15*01, IGKV3-20*01 or IGLV2-8*01; and/or
   [1262] the J gene segment is IGLJ2*01, IGLJ3*02, IGKJ3*01, IGKJ4*01 or IGKJ2*04; or
[1263] ii) comprises framework regions FR1, FR2, FR3 and FR4, wherein
   [1264] FR1 aligns with human germline V gene segment IGLV3-1*01, IGLV3-10*01, IGKV1-27*01, IGKV3-15*01, IGKV3-20*01 or IGLV2-8*01 with up to 1, 2, 3, 4, or 5 amino acid alterations,
   [1265] FR2 aligns with human germline V gene segment IGLV3-1*01, IGLV3-10*01, IGKV1-27*01, IGKV3-15*01, IGKV3-20*01 or IGLV2-8*01 with up to 1, 2, 3, 4, or 5 amino acid alterations,
   [1266] FR3 aligns with human germline V gene segment IGLV3-1*01, IGLV3-10*01, IGKV1-27*01, IGKV3-15*01, IGKV3-20*01 or IGLV2-8*01 with up to 1, 2, 3, 4 or 5 amino acid alterations, and/or
   [1267] FR4 aligns with human germline J gene segment IGLJ2*01, IGLJ3*02, IGKJ3*01, IGKJ4*01 or IGKJ2*04 with up to 1, 2, 3, 4 or 5 amino acid alterations.

[1268] In one embodiment, the antibody comprises an antibody VL domain derived from recombination of a human light chain V gene segment and a human light chain J gene segment, wherein: the V gene segment is IGLV3-1*01, IGLV3-10*01, IGKV1-27*01, IGKV3-15*01, IGKV3-20*01 or IGLV2-8*01, and optionally the J gene segment is IGLJ2*01, IGLJ3*02, IGKJ3*01, IGKJ4*01 or IGKJ2*04.

[1269] Example combinations of v and j gene segments for heavy and light chain variable domains are shown in Table 3, and these represent preferred combinations. The heavy and light chain variable domains may optionally be derived from the v and j gene segments identified in Table 3 for any one individual YANG antibody identified.

### Antibodies—General

[1270] In an embodiment, the antibody as defined anywhere herein shows ADCC activity.

[1271] In an embodiment, the antibody as defined anywhere herein does not cross-react with the existing endemic seasonal coronaviruses (NL63, 229E, OC43 and HKU1).

[1272] In an embodiment, the antibody as defined anywhere herein cross-reacts with SARS-CoV spike protein and/or MERS-CoV spike protein.

[1273] An antibody as defined anywhere herein may be a human IgG1 or human IgG4. In one embodiment, the antibody is a human IgG1. In one embodiment, the antibody is a human IgG1 comprising a constant region sequence of SEQ ID NO: 418. In one embodiment, the antibody is a human IgG4. In one embodiment, the antibody is a human IgG4 comprising a constant region sequence of SEQ ID NO: 436.

[1274] An antibody as defined anywhere herein may be a human IgA1 (e.g., comprising a constant region sequence SEQ ID NO: 484) or human IgA2 (e.g., comprising a constant region sequence SEQ ID NO: 485).

[1275] An antibody as defined anywhere herein may comprise kappa (κ) light chain constant regions, preferably constant domain sequence SEQ ID NO: 448.

[1276] Nucleic acid may comprise a sequence that encodes a VH domain and/or an VL domain of an antibody as defined anywhere herein. The nucleic acid may comprise a sequence that encodes a VH domain and/or a VL domain of antibody IMPI-029, IMPI-056, IMPI-005, IMPI-012, IMPI-052, IMPI-002, IMPI-041, IMPI-036, IMPI-055, IMPI-054, IMPI-042, IMPI-021, IMPI-004, IMPI-047, IMPI-017, IMPI-059, IMPI-030, IMPI-053, IMPI-025, IMPI-040, IMPI-007, IMPI-020, IMPI-032, IMPI-023, IMPI-039, IMPI-001, IMPI-019, IMPI-010, IMPI-008, IMPI-031, IMPI-057, IMPI-022, IMPI-035, IMPI-067, IMPI-072, IMPI-003, IMPI-013, IMPI-063, IMPI-061, IMPI-062, IMPI-064, IMPI-065, IMPI-066, IMPI-069, IMPI-070, IMPI-071; IMPI-026, IMPI-034, IMPI-016, IMPI-050, IMPI-049, IMPI-015, IMPI-009, IMPI-011, IMPI-044, IMPI-046, IMPI-051, IMPI-024, IMPI-058, IMPI-043, IMPI-045, IMPI-027, IMPI-018, IMPI-048, IMPI-033, IMPI-014, IMPI-028, IMPI-038 or IMPI-068.

[1277] Nucleic acid may comprise a sequence that encodes the VH domain of antibody IMPI-029, IMPI-056, IMPI-005, IMPI-012, IMPI-052, IMPI-002, IMPI-041, IMPI-036, IMPI-055, IMPI-054, IMPI-042, IMPI-021, IMPI-004, IMPI-047, IMPI-017, IMPI-059, IMPI-030, IMPI-053, IMPI-025, IMPI-040, IMPI-007, IMPI-020, IMPI-032, IMPI-023, IMPI-039, IMPI-001, IMPI-019, IMPI-010, IMPI-008, IMPI-031, IMPI-057, IMPI-022, IMPI-035, IMPI-067, IMPI-072, IMPI-003, IMPI-013, IMPI-063, IMPI-061, IMPI-062, IMPI-064, IMPI-065, IMPI-066, IMPI-069, IMPI-070, IMPI-071; IMPI-026, IMPI-034, IMPI-016, IMPI-050, IMPI-049, IMPI-015, IMPI-009, IMPI-011, IMPI-044, IMPI-046, IMPI-051, IMPI-024, IMPI-058, IMPI-043, IMPI-045, IMPI-027, IMPI-018, IMPI-048, IMPI-033, IMPI-014, IMPI-028, IMPI-038 or IMPI-068.

[1278] Nucleic acid may comprise a sequence that encodes the VL domain of antibody IMPI-029, IMPI-056, IMPI-005, IMPI-012, IMPI-052, IMPI-002, IMPI-041, IMPI-036, IMPI-055, IMPI-054, IMPI-042, IMPI-021, IMPI-004, IMPI-047, IMPI-017, IMPI-059, IMPI-030, IMPI-053, IMPI-025, IMPI-040, IMPI-007, IMPI-020, IMPI-032, IMPI-023, IMPI-039, IMPI-001, IMPI-019, IMPI-010, IMPI-008, IMPI-031, IMPI-057, IMPI-022, IMPI-035, IMPI-067, IMPI-072, IMPI-003, IMPI-013, IMPI-063, IMPI-061, IMPI-062, IMPI-064, IMPI-065, IMPI-066, IMPI-069, IMPI-070, IMPI-071; IMPI-026, IMPI-034, IMPI-016, IMPI-050, IMPI-049, IMPI-015, IMPI-009, IMPI-011, IMPI-044, IMPI-046, IMPI-051, IMPI-024, IMPI-058, IMPI-043, IMPI-045, IMPI-027, IMPI-018, IMPI-048, IMPI-033, IMPI-014, IMPI-028, IMPI-038 or IMPI-068.

[1279] A nucleic acid sequence provided by the invention may comprise a sequence that encodes a VH domain and/or an VL domain of an antibody as defined anywhere herein.

[1280] The nucleic acid may comprise a sequence that encodes a VH domain and/or a VL domain of antibody IMPI-037.

[1281] The nucleic acid may comprise a sequence that encodes a VH domain and/or a VL domain of antibody YANG-1101.

[1282] The nucleic acid may comprise a sequence that encodes a VH domain and/or a VL domain of antibody YANG-1103.

[1283] The nucleic acid may comprise a sequence that encodes a VH domain and/or a VL domain of antibody YANG-1105. nucleic acid may comprise a sequence that encodes a VH domain and/or a VL domain of antibody YANG-1106.

[1284] The nucleic acid may comprise a sequence that encodes a VH domain and/or a VL domain of antibody YANG-1107.

[1285] The nucleic acid may comprise a sequence that encodes a VH domain and/or a VL domain of antibody YANG-1108.

[1286] The nucleic acid may comprise a sequence that encodes a VH domain and/or a VL domain of antibody YANG-1109.

[1287] The nucleic acid may comprise a sequence that encodes a VH domain and/or a VL domain of antibody YANG-1110.

[1288] The nucleic acid may comprise a sequence that encodes a VH domain and/or a VL domain of antibody YANG-1112.

[1289] The nucleic acid may comprise a sequence that encodes a VH domain and/or a VL domain of antibody YANG-1113.

[1290] The nucleic acid may comprise a sequence that encodes a VH domain and/or a VL domain of antibody YANG-1114.

[1291] The nucleic acid may comprise a sequence that encodes a VH domain and/or a VL domain of antibody YANG-1115.

[1292] The nucleic acid may comprise a sequence that encodes a VH domain and/or a VL domain of antibody YANG-1116.

[1293] The nucleic acid may comprise a sequence that encodes a VH domain and/or a VL domain of antibody YANG-1117.

[1294] The nucleic acid may comprise a sequence that encodes a VH domain and/or a VL domain of antibody YANG-1118.

[1295] The nucleic acid may comprise a sequence that encodes a VH domain and/or a VL domain of antibody YANG-1119.

[1296] The nucleic acid may comprise a sequence that encodes a VH domain and/or a VL domain of antibody YANG-2101.

[1297] The nucleic acid may comprise a sequence that encodes a VH domain and/or a VL domain of antibody YANG-2102.

[1298] The nucleic acid may comprise a sequence that encodes a VH domain and/or a VL domain of antibody YANG-2103.

[1299] The nucleic acid may comprise a sequence that encodes a VH domain and/or a VL domain of antibody YANG-2104.

[1300] The nucleic acid may comprise a sequence that encodes a VH domain and/or a VL domain of antibody YANG-2105.

[1301] The nucleic acid may comprise a sequence that encodes a VH domain and/or a VL domain of antibody YANG-2106.

[1302] The nucleic acid may comprise a sequence that encodes a VH domain and/or a VL domain of antibody YANG-2107.

[1303] The nucleic acid may comprise a sequence that encodes a VH domain and/or a VL domain of antibody YANG-2108.

[1304] The nucleic acid may comprise a sequence that encodes a VH domain and/or a VL domain of antibody YANG-2109.

[1305] The nucleic acid may comprise a sequence that encodes a VH domain and/or a VL domain of antibody YANG-2110.

[1306] The nucleic acid may comprise a sequence that encodes a VH domain and/or a VL domain of antibody YANG-2111.

[1307] The nucleic acid may comprise a sequence that encodes a VH domain and/or a VL domain of antibody YANG-1201.

[1308] The nucleic acid may comprise a sequence that encodes a VH domain and/or a VL domain of antibody YANG-1202.

[1309] The nucleic acid may comprise a sequence that encodes a VH domain and/or a VL domain of antibody YANG-1203.

[1310] The nucleic acid may comprise a sequence that encodes a VH domain and/or a VL domain of antibody YANG-1204.

[1311] The nucleic acid may comprise a sequence that encodes a VH domain and/or a VL domain of antibody YANG-1205.

[1312] The nucleic acid may comprise a sequence that encodes a VH domain and/or a VL domain of antibody YANG-1206.

[1313] The nucleic acid may comprise a sequence that encodes a VH domain and/or a VL domain of antibody YANG-1207.

[1314] The nucleic acid may comprise a sequence that encodes a VH domain and/or a VL domain of antibody YANG-2201.

[1315] The nucleic acid may comprise a sequence that encodes a VH domain and/or a VL domain of antibody YANG-2202.

[1316] The nucleic acid may comprise a sequence that encodes a VH domain and/or a VL domain of antibody YANG-2203.

[1317] The nucleic acid may comprise a sequence that encodes a VH domain and/or a VL domain of antibody YANG-2204.

[1318] The nucleic acid may comprise a sequence that encodes a VH domain and/or a VL domain of antibody YANG-2205.

[1319] The nucleic acid may comprise a sequence that encodes a VH domain and/or a VL domain of antibody YANG-2206.

[1320] The nucleic acid may comprise a sequence that encodes a VH domain and/or a VL domain of antibody YANG-2207.

[1321] The nucleic acid may comprise a sequence that encodes a VH domain and/or a VL domain of antibody YANG-2208.

[1322] The nucleic acid may comprise a sequence that encodes a VH domain and/or a VL domain of antibody YANG-1102.

[1323] The nucleic acid may comprise a sequence that encodes a VH domain and/or a VL domain of antibody YANG-1111.

[1324] The nucleic acid may comprise a sequence that encodes a VH domain and/or a VL domain of antibody YANG-1401.

[1325] The nucleic acid may comprise a sequence that encodes a VH domain and/or a VL domain of antibody YANG-1402.

[1326] The nucleic acid may comprise a sequence that encodes a VH domain and/or a VL domain of antibody YANG-1403.

[1327] The nucleic acid may comprise a sequence that encodes a VH domain and/or a VL domain of antibody YANG-2112.

[1328] The nucleic acid may comprise a sequence that encodes a VH domain and/or a VL domain of antibody YANG-1301.

[1329] The nucleic acid may comprise a sequence that encodes a VH domain and/or a VL domain of antibody YANG-1302.

[1330] The nucleic acid may comprise a sequence that encodes a VH domain and/or a VL domain of antibody YANG-1303.

[1331] The nucleic acid may comprise a sequence that encodes a VH domain and/or a VL domain of antibody YANG-1304.

[1332] The nucleic acid may comprise a sequence that encodes a VH domain and/or a VL domain of antibody YANG-1305.

[1333] The nucleic acid may comprise a sequence that encodes a VH domain and/or a VL domain of antibody YANG-2301.

[1334] The nucleic acid may comprise a sequence that encodes a VH domain and/or a VL domain of antibody YANG-2302.

[1335] The nucleic acid may comprise a sequence that encodes a VH domain and/or a VL domain of antibody YANG-2303.

[1336] The nucleic acid may comprise a sequence that encodes a VH domain and/or a VL domain of antibody YANG-2304.

[1337] The nucleic acid may comprise a sequence that encodes a VH domain and/or a VL domain of antibody YANG-2305.

[1338] The nucleic acid may comprise a sequence that encodes a VH domain and/or a VL domain of antibody YANG-2306.

[1339] A vector may comprise the nucleic acid as defined anywhere herein; optionally wherein the vector is a CHO vector.

[1340] A host cell may comprise the nucleic acid as defined anywhere herein or the vector as defined anywhere herein.

[1341] A pharmaceutical composition may comprise an antibody as defined anywhere herein and a pharmaceutically acceptable excipient.

[1342] A pharmaceutical composition may comprise an isolated nucleic acid encoding an antibody as defined anywhere herein, or the isolated nucleic acid as defined anywhere herein, and a pharmaceutically acceptable excipient.

[1343] In one embodiment, the pharmaceutical composition is formulated for intravenous, intramuscular or subcutaneous administration.

[1344] In one embodiment, the pharmaceutical composition further comprises at least one further therapeutic agent.

[1345] In one embodiment, the further therapeutic agent is at least one, preferably one or two, further antibodies.

[1346] In one embodiment, the at least one further antibody is selected from:
[1347] an antibody that specifically binds to the receptor binding domain (RBD) of the S1 subunit of the SARS-CoV-2 spike protein and competes for binding to the SARS-CoV-2 spike protein with the human ACE2 receptor;
[1348] an antibody that specifically binds to the receptor binding domain (RBD) of the S1 subunit of the SARS-CoV-2 spike protein and does not compete for binding to the SARS-CoV-2 spike protein with the human ACE2 receptor;
[1349] an antibody that specifically binds to the N-terminal domain (NTD) of the S 1 subunit of the of SARS-CoV-2 spike protein;
[1350] an antibody that specifically binds to the S2 subunit of the of SARS-CoV-2 spike protein; and an antibody preferentially binds to the trimer form of the SARS-CoV-2 spike protein over the isolated RBD domain, S1 subunit and S2 subunit ofthe SARS-CoV-2 spike protein.

[1351] In one embodiment, the pharmaceutical composition comprises a first antibody that specifically binds to the receptor binding domain (RBD) of the S1 subunit of the SARS-CoV-2 spike protein and competes for binding to the SARS-CoV-2 spike protein with the human ACE2 receptor and a second antibody that specifically binds to the S2 subunit of the of SARS-CoV-2 spike protein. Such combinations have been found to advantageously inhibit syncytia formation. In this embodiment, the pharmaceutical composition may be capable of syncytia formation inhibition of 45% or greater or even 50% or greater (e.g. as measured in a syncytia formation inhibition assay as described herein). The first antibody may be an antibody according to the first aspect of the invention. The second antibody may be an antibody according to the third aspect of the invention. In this embodiment, the first antibody maybe IMPI-059 or an antibody having HCDR3, the 6 CDRs, or the VH and/or VL domain sequences of IMPI-059. In this embodiment, the second antibody may be YANG-2204, YANG-2206, and YANG-2207 or an antibody having HCDR3, the 6 CDRs, or the VH and/or VL domain sequences of YANG-2204, YANG-2206, and YANG-2207. In this embodiment, the first antibody may be an antibody having the 6 CDRs of IMPI-059 and the second antibody may an antibody having the 6 CDRs of YANG-2204. In this embodiment, the first antibody may be an antibody having the 6 CDRs of IMPI-059 and the second antibody may an antibody having the 6 CDRs of YANG-2206. In this embodiment, the first antibody may be an antibody having the 6 CDRs of IMPI-059 and the second antibody may an antibody having the 6 CDRs of YANG-2207. In this embodiment, the first antibody may be an antibody having the VH and VL domain sequences of IMPI-059 and the second antibody may an antibody having the VH and VL domain sequences of YANG-2204. In this embodiment, the first antibody may be an antibody having the VH and VL domain sequences of IMPI-059 and the second antibody may an antibody having the VH and VL domain sequences of YANG-2206. In this embodiment, the first antibody may be an antibody having the VH and VL domain sequences of IMPI-059 and the second antibody may an antibody having the VH and VL domain sequences of YANG-2207.

[1352] A kit may comprise the pharmaceutical composition as defined anywhere herein. In one embodiment, the kit further comprises at least one further therapeutic agent. In one embodiment, the further therapeutic agent is a further pharmaceutical composition comprising at least one, preferably one or two, further antibodies. In one embodiment, the at least one further antibody is selected from: an antibody that specifically binds to the receptor binding domain (RBD) of the S1 subunit of the SARS-CoV-2 spike protein and competes for binding to the SARS-CoV-2 spike protein with the human ACE2 receptor;
[1353] an antibody that specifically binds to the receptor binding domain (RBD) of the S1 subunit of the SARS-CoV-2 spike protein and does not compete for binding to the SARS-CoV-2 spike protein with the human ACE2 receptor;
[1354] an antibody that specifically binds to the N-terminal domain (NTD) of the S 1 subunit of the of SARS-CoV-2 spike protein;
[1355] an antibody that specifically binds to the S2 subunit of the of SARS-CoV-2 spike protein; and an antibody preferentially binds to the trimer form of the SARS-CoV-2 spike protein over the isolated RBD domain, S1 subunit and S2 subunit ofthe SARS-CoV-2 spike protein.

[1356] In one embodiment, the kit comprises a first antibody that specifically binds to the receptor binding domain (RBD) of the S1 subunit of the SARS-CoV-2 spike protein and competes for binding to the SARS-CoV-2 spike protein with the human ACE2 receptor and a second antibody that specifically binds to the S2 subunit of the of SARS-CoV-2 spike protein. Such combinations have been found to advantageously inhibit syncytia formation. In this embodiment, the kit may be capable of syncytia formation inhibition of 45% or greater or even 50% or greater (e.g. as measured in a syncytia formation inhibition assay as described herein). The first antibody may be an antibody according to the first aspect of the invention. The second antibody may be an antibody according to the third aspect of the invention. In this embodiment, the first antibody may be IMPI-059 or an antibody having HCDR3, the 6 CDRs, or the VH and/or VL domain sequences of IMPI-059. In this embodiment, the second antibody may be YANG-2204, YANG-2206, and YANG-2207 or an antibody having HCDR3, the 6 CDRs, or the VH and/or VL domain sequences of YANG-2204, YANG-2206, and YANG-2207. In this embodiment, the first antibody may be an antibody having the 6 CDRs of IMPI-059 and the second antibody may an antibody having the 6 CDRs of YANG-2204. In this embodiment, the first antibody may be an antibody having the 6 CDRs of IMPI-059 and the second antibody may an antibody having the 6 CDRs of YANG-2206. In this embodiment, the first antibody may be an antibody having the 6 CDRs of IMPI-059 and the second antibody may an antibody having the 6 CDRs of YANG-2207. In this embodiment, the first antibody may be an antibody having the VH and VL domain sequences of IMPI-059 and the second antibody may an antibody having the VH and VL domain sequences of YANG-2204. In this embodiment, the first antibody may be an antibody having the VH and VL domain sequences of IMPI-059 and the second antibody may an antibody having the VH and VL domain sequences of YANG-2206. In this embodiment, the first antibody may be an antibody having the VH and VL domain sequences of IMPI-059 and the second antibody may an antibody having the VH and VL domain sequences of YANG-2207.

[1357] In one embodiment, the kit further comprises a label or instructions for use to treat and/or prevent a SARS-CoV-2-related disease or condition, such as COVID-19, in a human; optionally wherein the label or instructions comprise a marketing authorisation number (e.g., an FDA or EMA authorisation number); optionally wherein the kit comprises an IV or injection device that comprises the antibody or fragment.

[1358] An antibody as defined anywhere herein or a composition as defined anywhere herein may be provided for use as a medicament.

[1359] The antibody as defined anywhere herein, or the composition as defined anywhere herein, may be provided for use in a method of treating a SARS-CoV-2-related disease or condition, said method comprising administering the antibody or composition to a patient.

[1360] The antibody as defined anywhere herein, or the composition as defined anywhere herein, may be provided for use in a method of preventing a SARS-CoV-2-related disease or condition, said method comprising administering the antibody or composition to a patient.

[1361] Also described is the use of an antibody as defined anywhere herein, or the composition as defined anywhere herein, in the manufacture of a medicament for use in a method of treating a SARS-CoV-2-related disease or condition.

[1362] Also described is the use of an antibody as defined anywhere herein, or the composition as defined anywhere herein, in the manufacture of a medicament for use in a method of preventing a SARS-CoV-2-related disease or condition.

[1363] A method of treating a SARS-CoV-2-related disease or condition in a human may comprise administering to said human a therapeutically effective amount of an antibody as defined anywhere herein, or the composition as defined anywhere herein.

[1364] A method of preventing a SARS-CoV-2-related disease or condition in a human may comprise administering to said human a therapeutically effective amount of an antibody as defined anywhere herein, or the composition as defined anywhere herein.

[1365] In one embodiment, the SARS-CoV-2-related disease or condition is a SARS-CoV-2-mediated disease or condition.

[1366] In one embodiment, the SARS-CoV-2-related disease or condition is a COVID-19-related disease or condition. In some examples, the COVID-19-related disease or condition is COVID-19. In some examples, the COVID-19-related disease or condition is a long manifestation of infection by SARS-CoV-2 such as ‘Long COVID’.

[1367] In one embodiment, the SARS-CoV-2-related disease or condition is COVID-19.

[1368] In one embodiment, the method further comprises administering at least one further therapeutic agent.

[1369] In one embodiment, the administration of the further therapeutic agent is simultaneous, separate or sequential.

[1370] In one embodiment, the further therapeutic agent is at least one, preferably one or two, further antibodies.

[1371] In one embodiment, the at least one further antibody is selected from:
[1372] an antibody that specifically binds to the receptor binding domain (RBD) of the S1 subunit of the SARS-CoV-2 spike protein and competes for binding to the SARS-CoV2 spike protein with the human ACE2 receptor;
[1373] an antibody that specifically binds to the receptor binding domain (RBD) of the S1 subunit of the SARS-CoV-2 spike protein and does not compete for binding to the SARS-CoV-2 spike protein with the human ACE2 receptor;
[1374] an antibody that specifically binds to the N-terminal domain (NTD) of the S 1 subunit of the of SARS-CoV-2 spike protein;
[1375] an antibody that specifically binds to the S2 subunit of the of SARS-CoV-2 spike protein; and an antibody preferentially binds to the trimer form of the SARS-CoV-2 spike protein over the isolated RBD domain, S1 subunit and S2 subunit ofthe SARS-CoV-2 spike protein.

[1376] In one embodiment, the method comprises administering a first antibody that specifically binds to the receptor binding domain (RBD) of the S1 subunit of the SARS-CoV-2 spike protein and competes for binding to the SARS-CoV-2 spike protein with the human ACE2 receptor and a second antibody that specifically binds to the S2 subunit of the of SARS-CoV-2 spike protein. Such combinations have been found to advantageously inhibit syncytia formation. In this embodiment, the method may be capable of syncytia formation inhibition of 45% or greater or even 50% or greater (e.g. as measured in a syncytia formation inhibition assay as described herein). The first antibody may be an antibody according to the first aspect of the invention. The second antibody may be an antibody according to the third aspect of the invention. In this embodiment, the first antibody may be IMPI-059 or an antibody having HCDR3, the 6 CDRs, or the VH and/or VL domain sequences of IMPI-059. In this embodiment, the second antibody may be YANG-2204, YANG-2206, and YANG-2207 or an antibody having HCDR3, the 6 CDRs, or the VH and/or VL domain sequences of YANG-2204, YANG-2206, and YANG-2207. In this embodiment, the first antibody may be an antibody having the 6 CDRs of IMPI-059 and the second antibody may an antibody having the 6 CDRs of YANG-2204. In this embodiment, the first antibody may be an antibody having the 6 CDRs of IMPI-059 and the second antibody may an antibody having the 6 CDRs of YANG-2206. In this embodiment, the first antibody may be an antibody having the 6 CDRs of IMPI-059 and the second antibody may an antibody having the 6 CDRs of YANG-2207. In this embodiment, the first antibody may be an antibody having the VH and VL domain sequences of IMPI-059 and the second antibody may an antibody having the VH and VL domain sequences of YANG-2204. In this embodiment, the first antibody may be an antibody having the VH and VL domain sequences of IMPI-059 and the second antibody may an antibody having the VH and VL domain sequences of YANG-2206. In this embodiment, the first antibody may be an antibody having the VH and VL domain sequences of IMPI-059 and the second antibody may an antibody having the VH and VL domain sequences of YANG-2207.

[1377] In one example, the first antibody and the second antibody may be administered simultaneously, separately, or sequentially.

[1378] Also described is the use of an antibody as defined anywhere herein, for determining the presence or absence of SARS-CoV-2 in a sample.

[1379] A method of determining the presence or absence of SARS-CoV-2 in a sample may comprise contacting the sample with an antibody as defined anywhere herein; and testing for binding between the antibody and SARS-CoV2 in the sample; wherein detection of binding indicates the presence of SARS-CoV-2 in the sample and wherein absence of binding indicates the absence of SARS-CoV-2 in the sample.

[1380] In one embodiment, the antibody comprises or is conjugated to a detectable label.

[1381] In one embodiment, the sample has been obtained from a human who has been or is suspected of having been infected with SARS-CoV-2 and/or who exhibits one or more symptoms of COVID-19. In one embodiment, the sample is a serum, plasma, or whole blood sample, an oral or nasal swab, urine, faeces, or cerebrospinal fluid (CFS), or wherein the sample is from any suspected SARS-CoV-2 infected organ or tissue.

[1382] A diagnostic kit for the use as defined anywhere herein, or the method as defined anywhere herein, may comprise an antibody as defined anywhere herein, and optionally one or more buffering solutions. In one embodiment, the diagnostic kit comprises a first reagent comprising the antibody as defined anywhere herein, and a second reagent comprising a detector molecule that binds to the first reagent. In one embodiment, the detector molecule is an antibody that comprises or is conjugated to a detectable label.

### BRIEF DESCRIPTION OF THE DRAWINGS

[1383] FIG. 1. depicts a single monomer of the SARS-CoV-2 virus trimeric spike protein (S).

[1384] FIGS. 2A-2B: Amino acid sequence of the SARS-CoV-2 spike protein, with residue numbering for the nascent polypeptide. The signal peptide (residues 1-13, bold italics) is cleaved off before secretion. During maturation the polypeptide is cleaved at the S1/S2 cleavage site (residues 681-686, boxed) into subunits S1 (residues 14-685) and S2 (residues 686-1273, bold). These subunits remain non-covalently attached. The S1 subunit is further sub-divided into two functional domains: the N-terminal domain (NTD) (residues 14-306, wavy underlined) and the Receptor Binding Domain (RBD) (residues 331-528, underlined). The S2 subunit contains a transmembrane-domain (residues 1212-1234, bold underlined); the ectodomain (ECD) of spike contains all membrane-distal residues of subunits S1 and S2 (residues 1-1211). Following secretion, the protein is further cleaved at the S2′ cleavage site (residues 815-816) upon cell adhesion, initiating a conformational change in the spike protein that leads to virus entry into the cell. To prevent the protein from spontaneously changing conformation in in vitro assays, a double-proline mutation (residues 986-987, dashed box) was introduced to stabilise the protein in its pre-fusion configuration. FIG. 2A depicts the wild-type spike protein amino acid sequence. FIG. 2B depicts the engineered spike protein sequence containing substitutions K986P and V987P.

[1385] FIGS. 3A-3Z: Alignments of exemplary anti-SARS-CoV-2 antibody light and heavy chain amino acid sequences showing exemplary anti-SARS-CoV-2 antibodies and their siblings based on sequence homology. In summary, clusters were generated as follows: B cells were isolated from the immunised mice and their antibody-encoding sequences were recovered. By comparing sequences of the heavy and light chain variable domains, we identified clusters of sequences which correspond to families of B cells within a lineage. These clusters share the same v and j gene segments in their heavy and light chain variable domains and the same HCDR3 length. Given their inferred in vivo evolutionary relationship, all siblings within a cluster may be expected to share similar qualitative properties such as epitope binding and mode of action, especially where siblings were obtained from B cells which were recovered by antigen specific sorting, even if assay data for those siblings are not provided herein.

[1386] FIG. 4: Diagram showing binding properties of exemplary antibodies described herein as determined by HTRF.

[1387] FIG. 5: Neutralisation of SARS CoV-2 pseudovirus by RBD binding ACE2 competing antibodies mAb A, mAb B, mAb C and SAD S35.

[1388] FIG. 6:

Neutralisation of SARS CoV2 pseudovirus by RBD ACE2 competing antibodies. Graph shows only antibodies that are equivalent to or more potent than the comparator antibodies mAb A, mAb B, mAb C and SAD S35 (dashed lines).

[1389] FIG. 7: Neutralisation of SARS CoV2 pseudovirus by NTD binding antibody 4A8 compared to a RBD ACE2 competing antibody SAD-S35 (dashed line).

[1390] FIG. 8: Neutralisation of SARS CoV2 pseudovirus by RBD binding but non-ACE2 competing antibodies.

[1391] An RBD ACE2 competing antibody, SAD-S35, is included for comparison.

[1392] FIG. 9: Neutralisation of SARS CoV2 pseudovirus by S2 binding antibodies. An RBD ACE2 competing antibody, SAD-S35, is included for comparison (dashed line).

[1393] FIG. 10: Example of a neutralising antibody in the HTRF ACE2:trimer neutralisation assay (IMPI-027) and an antibody (IMPI-059) that increases binding activity.

[1394] FIG. 11: HTRF ACE2:trimer neutralisation curves for antibodies IMPI-024 and IMPI-068 which increase binding activity (open symbols), and comparator antibodies (filled symbols) which decrease binding activity.

[1395] FIG. 12: Epitope cross-competition binning of clones by SPR. Grey boxes indicate the two antibodies compete with each other for binding to RBD, white boxes indicate no competition between the pair of antibodies. Black boxes indicate assays not undertaken as they are the same antibody.

[1396] FIG. 13: IC50 values obtained for antibodies in live virus plaque neutralisation assay. Note log scale for IC50. The two control mAbs COV2-2196 and COV2-2130 are presently (October 2020) clinical candidate therapeutic antibodies. The 4 IMPI mAbs, tested singly (i.e., in monoclonal compositions), are also shown. IMPI-059 was the most potent antibody in this assay. IMPI-013 is an S2 binding neutralising mAb. IMPI-017 had an IC50 of 326 pM and IMPI-004 had an IC50 of 86 pM, IMPI-059 had an IC50 of 26 pM and IMPI-013 had an TC50 of 3.4 nM.

[1397] FIG. 14: Results of the syncytia inhibition assay of Example 18.

[1398] FIG. 15: Showing cluster information for antibody YANG-1401 VH

[1399] FIG. 16: Showing cluster information for antibody YANG-1401 VL

[1400] FIG. 17: Showing cluster information for antibodies YANG-2107 and YANG-2108 VH

[1401] FIG. 18: Showing cluster information for antibodies YANG-2107 and YANG-2108 VL

[1402] FIG. 19: Showing cluster information for antibody YANG-2111 VH

[1403] FIG. 20: Showing cluster information for antibody YANG-2111 VL

[1404] FIG. 21: Showing cluster information for antibody YANG-2203 VH

[1405] FIG. 22: Showing cluster information for antibody YANG-2203 VL

[1406] FIG. 23A-C: Showing cluster information for antibodies YANG-2204, YANG-2205, YANG-2206, YANG-2207, and YANG-2208 VH

[1407] FIG. 24A-C: Showing cluster information for antibodies YANG-2204, YANG-2205, YANG-2206, YANG-2207, and YANG-2208 VL

[1408] FIG. 25: Showing cluster information for antibody YANG-1112 VH

[1409] FIG. 26: Showing cluster information for antibody YANG-1112 VL

### DETAILED DESCRIPTION

### Definitions

[1410] Unless otherwise defined herein, scientific and technical terms shall have the meanings that are commonly understood by those of ordinary skill in the art. Further, unless otherwise required by context, singular terms shall include pluralities and plural terms shall include the singular.

[1411] The singular terms “a,” “an,” and “the” include plural referents unless context clearly indicates otherwise. Similarly, the word “or” is intended to include “and” unless the context clearly indicates otherwise.

[1412] Although methods and materials similar or equivalent to those described herein can be used in the practice or testing of this disclosure, suitable methods and materials are described below. The abbreviation, “e.g.” is derived from the Latin exempli gratia and is used herein to indicate a non-limiting example. Thus, the abbreviation “e.g.” is synonymous with the term “for example.”

[1413] In the specification and claims, the term “about” is used to modify, for example, the quantity of an ingredient in a composition, concentration, volume, process temperature, process time, yield, flow rate, pressure, and like values, and ranges thereof, employed in describing the examples of the disclosure. The term “about” refers to variation in the numerical quantity that can occur, for example, through typical measuring and handling procedures used for making compounds, compositions, concentrates or use formulations; through inadvertent error in these procedures; through differences in the manufacture, source, or purity of starting materials or ingredients used to carry out the methods, and like proximate considerations. The term “about” also encompasses amounts that differ due to aging of a formulation with a particular initial concentration or mixture and amounts that differ due to mixing or processing a formulation with a particular initial concentration or mixture. Where modified by the term “about” the claims appended hereto include equivalents to these quantities.

[1414] As used herein, “administer” or “administration” refers to the act of injecting or otherwise physically delivering a substance as it exists outside the body (e.g., an anti-SARS-CoV-2 spike protein antibody provided herein, or its encoding nucleic acid e.g. in an expression vector) into a patient, such as by mucosal, intradermal, intravenous, intramuscular delivery, inhalation e.g. nebulisation and/or any other method of physical delivery described herein or known in the art. When a disease, or a symptom thereof, is being treated, administration of the substance typically occurs after the onset of the disease or symptoms thereof When a disease, or symptoms thereof, are being prevented, administration of the substance typically occurs before the onset of the disease or symptoms thereof.

[1415] The term “antibody”, “immunoglobulin” or “Ig” may be used interchangeably herein and means an immunoglobulin molecule that recognizes and specifically binds to a target, such as a protein, polypeptide, peptide, carbohydrate, polynucleotide, lipid, or combinations of the foregoing through at least one antigen recognition site within the variable region of the immunoglobulin molecule. As used herein, the term “antibody” encompasses intact polyclonal antibodies, intact monoclonal antibodies, antibody fragments (such as Fab, Fab′, F(ab′)2, and Fv fragments), single chain Fv (scFv) mutants, multispecific antibodies such as bispecific antibodies (including dual binding antibodies), chimeric antibodies, humanized antibodies, human antibodies, fusion proteins comprising an antigen determination portion of an antibody, and any other modified immunoglobulin molecule comprising an antigen recognition site so long as the antibodies exhibit the desired biological activity. The term “antibody” can also refer to a Y-shaped glycoprotein with a molecular weight of approximately 150 kDa that is made up of four polypeptide chains: two light (L) chains and two heavy (H) chains. There are five types of mammalian Ig heavy chain isotypes denoted by the Greek letters alpha (α), delta (δ), epsilon (ε), gamma (γ), and mu (μ). The type of heavy chain defines the class of antibody, i.e., IgA, IgD, IgE, IgG, and IgM, respectively. The γ and α classes are further divided into subclasses on the basis of differences in the constant domain sequence and function, e.g., IgG1, hIgG2, mIgG2A, mIgG2B, IgG3, IgG4, IgA1 and IgA2. In mammals, there are two types of immunoglobulin light chains, and K. The “variable region” or “variable domain” of an antibody refers to the amino-terminal domains of the heavy or light chain of the antibody. The variable domains of the heavy chain and light chain may be referred to as “VH” and “VL”, respectively. These domains are generally the most variable parts of the antibody (relative to other antibodies of the same class) and contain the antigen binding sites. An example of antibodies are heavy chain-only (i.e., H2) antibodies that comprise a dimer of a heavy chain (5′-VH-(optional Hinge)-CH2-CH3-3′) and are devoid of a light chain. The antibodies described herein may be oligoclonal, polyclonal, monoclonal (including full-length monoclonal antibodies), camelised, chimeric, CDR-grafted, multi-specific, bi-specific (including dual-binding antibodies), catalytic, chimeric, humanized, fully human, anti-idiotypic, including antibodies that can be labelled in soluble or bound form as well as fragments, variants or derivatives thereof, either alone or in combination with other amino acid sequences provided by known techniques. An antibody may be from any species. Antibodies described herein can be naked or conjugated to other molecules such as toxins, radioisotopes, etc.

[1416] The term “antigen binding domain,” “antigen binding region,” “antigen binding fragment,” and similar terms refer to that portion of an antibody which comprises the amino acid residues that interact with an antigen and confer on the binding agent its specificity and affinity for the antigen (e.g. the complementarity determining regions (CDRs)). The antigen binding region can be derived from any animal species, such as rodents (e.g. rabbit, rat or hamster) and humans. Preferably, the antigen binding region will be of human origin.

[1417] Antigen binding fragments described herein can include single-chain Fvs (scFv), single-chain antibodies, single domain antibodies, domain antibodies, Fv fragments, Fab fragments, F(ab′) fragments, F(ab′)2 fragments, antibody fragments that exhibit the desired biological activity, disulfide-stabilised variable region (dsFv), dimeric variable region (diabody), anti-idiotypic (anti-Id) antibodies (including, e.g. anti-Id antibodies to antibodies), intrabodies, linear antibodies, single-chain antibody molecules and multispecific antibodies formed from antibody fragments and epitope-binding fragments of any of the above. In particular, antibodies and antibody fragments described herein can include immunoglobulin molecules and immunologically active fragments of immunoglobulin molecules, i.e., molecules that contain an antigen-binding site. Digestion of antibodies with the enzyme, papain, results in two identical antigen-binding fragments, known also as “Fab” fragments, and a “Fc” fragment, having no antigen-binding activity but having the ability to crystallize. “Fab” when used herein refers to a fragment of an antibody that includes one constant and one variable domain of each of the heavy and light chains. The term “Fc region” herein is used to define a C-terminal region of an immunoglobulin heavy chain, including native-sequence Fc regions and variant Fc regions. The “Fc fragment” refers to the carboxy-terminal portions of both H chains held together by disulfides. The effector functions of antibodies are determined by sequences in the Fc region, the region which is also recognized by Fc receptors (FcR) found on certain types of cells. Digestion of antibodies with the enzyme, pepsin, results in a F(ab′)2 fragment in which the two arms of the antibody molecule remain linked and comprise two-antigen binding sites. The F(ab′)2 fragment has the ability to crosslink antigen.

[1418] “Fv” when used herein refers to the minimum fragment of an antibody that retains both antigen-recognition and antigen-binding sites. This region consists of a dimer of one heavy and one light chain variable domain in tight, non-covalent or covalent association. It is in this configuration that the three CDRs of each variable domain interact to define an antigen-binding site on the surface of the VH-VL dimer. Collectively, the six CDRs confer antigen-binding specificity to the antibody. However, even a single variable domain (or half of an Fv comprising only three CDRs specific for an antigen) has the ability to recognize and bind antigen, although at a lower affinity than the entire binding site.

[1419] The term “monoclonal antibody” as used herein refers to an antibody obtained from a population of substantially homogeneous antibodies, i.e. the individual antibodies comprising the population are identical except for possible naturally occurring mutations and/or post-translation modifications (e.g. isomerizations, amidations) that may be present in minor amounts. Monoclonal antibodies are highly specific, and are directed against a single antigenic determinant or epitope. In contrast, polyclonal antibody preparations typically include different antibodies directed against different antigenic determinants (or epitopes). The term “monoclonal antibody” as used herein encompasses both intact and full-length monoclonal antibodies as well as antibody fragments (such as Fab, Fab′, F(ab′)2, Fv), single chain (scFv) mutants, fusion proteins comprising an antibody portion, and any other modified immunoglobulin molecule comprising an antigen recognition site. Furthermore, “monoclonal antibody” refers to such antibodies made in any number of ways including, but not limited to, hybridoma, phage selection, recombinant expression, and transgenic animals. The monoclonal antibodies herein can include “chimeric” antibodies (immunoglobulins) in which a portion of the heavy and/or light chain is identical with or homologous to corresponding sequences in antibodies derived from a particular species or belonging to a particular antibody class or subclass, while the remainder of the chain(s) is(are) identical with or homologous to corresponding sequences in antibodies derived from another species or belonging to another antibody class or subclass, as well as fragments of such antibodies that exhibit the desired biological activity.

[1420] The term “humanized antibody” refers to a subset of chimeric antibodies in which a “hypervariable region” from a non-human immunoglobulin (the donor antibody) replaces residues from a hypervariable region in a human immunoglobulin (recipient antibody). In general, a humanized antibody will include substantially all of at least one, and typically two, variable domains, in which all or substantially all of the hypervariable loops correspond to those of a non-human immunoglobulin sequence, and all or substantially all of the framework regions are those of a human immunoglobulin sequence, although the framework regions may include one or more substitutions that improve antibody performance, such as binding affinity, isomerization, immunogenicity, etc.

[1421] The term “bispecific antibody” means an antibody which comprises specificity for two target molecules, and includes, but is not limited to, formats such as DVD-Ig (see DiGiammarino et al., “Design and generation of DVD-Ig™ molecules for dual-specific targeting”, Meth. Mo. Biol., 2012, 889, 145-156), mAb2 (see WO2008/003103, the description of the mAb2 format is incorporated herein by reference), FIT-Ig (see WO2015/103072, the description of the FIT-Ig scaffold is incorporated herein by reference), mAb-dAb, dock and lock, Fab-arm exchange, SEEDbody, Triomab, LUZ-Y, Fcab, r,-body, orthogonal Fab, scDiabody-Fc, diabody-Fc, tandem scFv-Fc, Fab-scFv-Fc, Fab-scFv, intrabody, BiTE, diabody, DART, TandAb, scDiabody, scDiabody-CH3, Diabody-CH3, Triple body, Miniantibody, minibody, TriBi minibody, scFv-CH3 KIH, scFv-CH-CL-scFv, F(ab′)2-scFv, scFv-KIH, Fab-scFv-Fc, tetravalent HCab, ImmTAC, knobs-in-holes, knobs-in-holes with common light chain, knobs-in-holes with common light chain and charge pairs, charge pairs, charge pairs with common light chain, DT-IgG, DutaMab, IgG(H)-scFv, scFv-(H)IgG, IgG(L)-scFv, scFv-(L)IgG, IgG(L,H)-Fv, IgG(H)-V, V(H)—IgG, IgG(L)-V, V(L)-IgG, KIH IgG-scFab, 2 scFv-IgG, IgG-2 scFv, scFv4-Ig and zybody. For a review of bispecific formats, see Spiess, C., et al., Mol. Immunol. (2015). In another example, the bispecific molecule comprises an antibody which is fused to another non-Ig format, for example a T-cell receptor binding domain; an immunoglobulin superfamily domain; an agnathan variable lymphocyte receptor; a fibronectin domain (e.g. an Adnectin™); an antibody constant domain (e.g. a CH3 domain, e.g., a CH2 and/or CH3 of an Fcab™) wherein the constant domain is not a functional CH1 domain; an scFv; an (scFv)2; an sc-diabody; an scFab; a centyrin and an epitope binding domain derived from a scaffold selected from CTLA-4 (Evibody™); a lipocalin domain; Protein A such as Z-domain of Protein A (e.g. an Affibody™ or SpA); an A-domain (e.g. an Avimer™ or Maxibody™); a heat shock protein (such as and epitope binding domain derived from GroEI and GroES); a transferrin domain (e.g. a trans-body); ankyrin repeat protein (e.g. a DARPin™); peptide aptamer; C-type lectin domain (e.g. Tetranectin™); human γ-crystallin or human ubiquitin (an affilin); a PDZ domain; scorpion toxin; and a kunitz type domain of a human protease inhibitor.

[1422] In one example, the bispecific antibody is a mAb2. A mAb2 comprises a VH and VL domain from an intact antibody, fused to a modified constant region, which has been engineered to form an antigen-binding site, known as an “Fcab”. The technology behind the Fcab/mAb2 format is described in more detail in WO2008/003103, and the description of the mAb2 format is incorporated herein by reference.

[1423] In one example, a “bispecific antibody” does not include a FIT-Ig format. In one example, a “bispecific antibody” does not include a mAb2 format. In one example, a “bispecific antibody” does not include either a FIT-Ig format or a mAb2 format.

[1424] In another example, the bispecific antibody is a “dual binding antibody”. As used herein, the term “dual binding antibody” is a bispecific antibody wherein both antigen-binding domains are formed by a VH/VL pair, and includes FIT-Ig (see WO2015/103072, incorporated herein by reference), mAb-dAb, dock and lock, Fab-arm exchange, SEEDbody, Triomab, LUZ-Y, Fcab, d,-body, orthogonal Fab, scDiabody-Fc, diabody-Fc, tandem scFv-Fc, Fab-scFv-Fc, Fab-scFv, intrabody, BiTE, diabody, DART, TandAb, scDiabody, scDiabody-CH3, Diabody-CH3, Triple body, Miniantibody, minibody, scFv-CH3 KIH, scFv-CH-CL-scFv, F(ab′)2-scFv, scFv-KIH, Fab-scFv-Fc, tetravalent HCab, ImmTAC, knobs-in-holes, knobs-in-holes with common light chain, knobs-in-holes with common light chain and charge pairs, charge pairs, charge pairs with common light chain, DT-IgG, DutaMab, IgG(H)-scFv, scFv-(H)IgG, IgG(L)-scFv, scFv-(L)IgG, IgG(L,H)-Fv, IgG(H)-V, V(H)—IgG, IgG(L)-V, V(L)-IgG, KIH IgG-scFab, 2 scFv-IgG, IgG-2 scFv and scFv4-Ig.

[1425] The term “hypervariable region”, “CDR region” or “CDR” refers to the regions of an antibody variable domain which are hypervariable in sequence and/or form structurally defined loops. Generally, antigen binding sites of an antibody include six hypervariable regions: three in the VH (CDRH1, CDRH2, CDRH3), and three in the VL (CDRL1, CDRL2, CDRL3). These regions of the heavy and light chains of an antibody confer antigen-binding specificity to the antibody. CDRs may be defined according to the Kabat system (see Kabat, E. A.et al., 1991, “Sequences of Proteins of Immunological Interest”, 5th edit, NIH Publication no. 91-3242, U.S. Department of Health and Human Services). Other systems may be used to define CDRs, which as the system devised by Chothia et al (see Chothia, C. & Lesk, A. M., 1987, “Canonical structures for the hypervariable regions of immunoglobulins”, J. Mol. Biol., 196, 901-917) and the IMGT system (see Lefranc, M. P., 1997, “Unique database numbering system for immunogenetic analysis”, Immunol. Today, 18, 50). An antibody typically contains 3 heavy chain CDRs and 3 light chain CDRs. The term CDR or CDRs is used here to indicate one or several of these regions. A person skilled in the art is able to readily compare the different systems of nomenclature and determine whether a particular sequence may be defined as a CDR.

[1426] A “human antibody” is an antibody that possesses an amino-acid sequence corresponding to that of an antibody produced by a human and/or has been made using any of the techniques for making human antibodies and specifically excludes a humanized antibody comprising non-human antigen-binding residues. The term “specifically binds to” refers to measurable and reproducible interactions such as binding between a target and an antibody, which is determinative of the presence of the target in the presence of a heterogeneous population of molecules including biological molecules. For example, an antibody that specifically binds to a target (which can be an epitope) is an antibody that binds this target with greater affinity, avidity, more readily, and/or with greater duration than it binds to other targets. In one example, the extent of binding of an antibody to an unrelated target is less than about 10% of the binding of the antibody to the target as measured, e.g. by a radioimmunoassay (RIA).

[1427] An antibody that specifically binds to a SARS-CoV-2 spike protein antigen may be cross-reactive with related antigens such as those of other epidemic human coronaviruses like SARS and MERS. An antibody that specifically binds to a SARS-CoV-2 spike protein antigen can be identified, for example, by immunoassays, BIAcore™, or other techniques known to those of skill in the art. An antibody binds specifically to a SARS-CoV-2 spike protein antigen when it binds to a SARS-CoV-2 spike protein antigen with higher affinity than to any cross-reactive antigen as determined using experimental techniques, such as radioimmunoassays (RIA) and enzyme-linked immunosorbent assays (ELISAs). Typically, a specific or selective reaction will be at least twice background signal or noise and more typically more than 10 times (such as more than 15 times, more than 20 times, more than 50 times or more than 100 times) background. See, e.g. Paul, ed., 1989, Fundamental Immunology Second Edition, Raven Press, New York at pages 332-336 for a discussion regarding antibody specificity.

[1428] As used herein, “authorization number” or “marketing authorization number” refers to a number issued by a regulatory agency upon that agency determining that a particular medical product and/or composition may be marketed and/or offered for sale in the area under the agency's jurisdiction. As used herein “regulatory agency” refers to one of the agencies responsible for evaluating, e.g. the safety and efficacy of a medical product and/or composition and controlling the sales/marketing of such products and/or compositions in a given area. The Food and Drug Administration (FDA) in the US and the European Medicines Agency (EPA) in Europe are but two examples of such regulatory agencies. Other non-limiting examples can include SDA, MPA, MHPRA, IMA, ANMAT, Hong Kong Department of Health-Drug Office, CDSCO, Medsafe, and KFDA.

[1429] As used herein, the term “carrier” refers to a diluent, adjuvant (e.g., Freund's adjuvant (complete and incomplete)), excipient, or vehicle with which the therapeutic is administered. Such pharmaceutical carriers can be sterile liquids, such as water and oils, including those of petroleum, animal, vegetable or synthetic origin, such as peanut oil, soybean oil, mineral oil, sesame oil and the like. Water is a preferred carrier when the pharmaceutical composition is administered intravenously. Saline solutions and aqueous dextrose and glycerol solutions can also be employed as liquid carriers, particularly for injectable solutions.

[1430] As used herein, the term “composition” is intended to encompass a product containing the specified ingredients (e.g. an antibody) in, optionally, the specified amounts, as well as any product which results, directly or indirectly, from combination of the specified ingredients in, optionally, the specified amounts.

[1431] As used herein the term “comprising” or “comprises” is used with reference to antibodies, uses, compositions, methods, and respective component(s) thereof, that are essential to the method or composition, yet open to the inclusion of unspecified elements, whether essential or not.

[1432] The term “consisting of” refers to antibodies, uses, compositions, methods, and respective components thereof as described herein, which are exclusive of any element not recited in that description of the example.

[1433] As used herein the term “consisting essentially of” refers to those elements required for a given example. The term permits the presence of elements that do not materially affect the basic and novel or functional characteristic(s) of that example.

[1434] The term “effector function” as used herein is meant to refer to one or more of antibody dependant cell mediated cytotoxic activity (ADCC), complement-dependant cytotoxic activity (CDC) mediated responses, Fc-mediated phagocytosis or antibody dependant cellular phagocytosis (ADCP), antibody recycling via the FcRn receptor, opsonisation of the virus particle and complement-mediated disruption of virus particle lipid envelope.

[1435] An “effective amount” refers to an amount effective, at dosages and for periods of time necessary, to achieve the desired effect, including atherapeutic or prophylactic result. A “therapeutically effective amount” refers to the minimum concentration required to effect a measurable improvement or prevention of a particular disorder. A therapeutically effective amount herein may vary according to factors such as the disease state, age, sex, and weight of the patient, and the ability of the antibody to elicit a desired response in the individual. A therapeutically effective amount is also one in which toxic or detrimental effects of the antibody are outweighed by the therapeutically beneficial effects. A “prophylactically effective amount” refers to an amount effective, at the dosages and for periods of time necessary, to achieve the desired prophylactic result. In some examples, the effective amount of an antibody is from about 0.1 mg/kg (mg of antibody per kg weight of the subject) to about 100 mg/kg. In certain examples, an effective amount of an antibody provided therein is about 0.1 mg/kg, about 0.5 mg/kg, about 1 mg/kg, 3 mg/kg, 5 mg/kg, about 10 mg/kg, about 15 mg/kg, about 20 mg/kg, about 25 mg/kg, about 30 mg/kg, about 35 mg/kg, about 40 mg/kg, about 45 mg/kg, about 50 mg/kg, about 60 mg/kg, about 70 mg/kg, about 80 mg/kg about 90 mg/kg or about 100 mg/kg (or a range therein). In some examples, “effective amount” as used herein also refers to the amount of an antibody to achieve a specified result (e.g. neutralising the SARS-CoV-2 spike protein). The term “epitope” as used herein refers to a localized region on the surface of an antigen, such as SARS-CoV-2 spike protein, that is capable of being bound to one or more antigen binding regions of an antibody, and that has antigenic or immunogenic activity in an animal, preferably a mammal, and most preferably in a human, that is capable of eliciting an immune response. An epitope having immunogenic activity is a portion of a polypeptide that elicits an antibody response in an animal. An epitope having antigenic activity is a portion of a polypeptide to which an antibody specifically binds as determined by any method well known in the art, for example, by the immunoassays described herein. Antigenic epitopes need not necessarily be immunogenic. Epitopes usually consist of chemically active surface groupings of molecules such as amino acids or sugar side chains and have specific three-dimensional structural characteristics as well as specific charge characteristics. A region of a polypeptide contributing to an epitope may be contiguous amino acids of the polypeptide or the epitope may come together from two or more non-contiguous regions of the polypeptide. The epitope may or may not be a three-dimensional surface feature of the antigen. In certain embodiments, a SARS-CoV-2 spike protein epitope is athree-dimensional surface feature of a SARS-CoV-2 spike protein polypeptide (e.g. in a trimeric form of a SARS-CoV-2 spike protein polypeptide). In other embodiments, a SARS-CoV-2 spike protein epitope is linear feature of a SARS-CoV-2 spike protein polypeptide (e.g. in a trimeric form or monomeric form of the SARS-CoV-2 spike protein polypeptide). Antibodies provided herein may specifically bind to an epitope of the monomeric (denatured) form of SARS-CoV-2 spike protein, an epitope of the trimeric (native) form of SARS-CoV-2 spike protein, or both the monomeric (denatured) form and the trimeric (native) form of SARS-CoV-2 spike protein. In specific examples, the antibodies provided herein specifically bind to an epitope of the trimeric form of SARS-CoV-2 spike protein but do not specifically bind the monomeric form of SARS-CoV-2 spike protein. In certain embodiments, antibodies provided herein may specifically bind to an epitope of the SARS-CoV-2 spike protein in part by using an interaction with an N-linked glycan or another post-translational modification of the spike protein. Binding to the respective epitope thus might involve moving the N-linked glycan or post-translational modification away thereby removing or reducing steric hindrance that would otherwise prevent or hinder antibody binding. In certain embodiments, antibodies provided herein may specifically bind to an epitope of the SARS-CoV-2 spike protein that only arises following priming cleavage between S1 and S2 or following activating cleavage at the S2′ cleavage site. Antibodies may be provided which bind to the same epitope as any antibody disclosed herein. Antibodies may be provided which bind to the same epitope as an IMPI antibody disclosed herein. Antibodies may be provided which bind to the same epitope as a YANG antibody disclosed herein. This is optionally determined using X-ray crystallography or other fine mapping techniques such as electron microscopy to identify the contact points between antibody and antigen. An antibody may contact the SARS-CoV-2 spike protein with a footprint that fully or partly overlaps with that of an antibody disclosed herein. An antibody may contact the SARS-CoV-2 spike protein with a footprint that fully or partly overlaps with that of an IMPI antibody.

[1436] An antibody may contact the SARS-CoV-2 spike protein with a footprint that fully or partly overlaps with that of a YANG antibody. As described elsewhere herein, competition between antibodies may also be determined, for example using SPR, and antibodies of the present invention may compete for binding to the spike protein (compete for binding to their epitope) with an IgG antibody that is any IMPI antibody or YANG antibody described herein.

[1437] The term “excipients” as used herein refers to inert substances which are commonly used as a diluent, vehicle, preservatives, binders, or stabilizing agent for drugs and includes, but not limited to, proteins (e.g. serum albumin, etc.), amino acids (e.g. aspartic acid, glutamic acid, lysine, arginine, glycine, histidine, etc.), fatty acids and phospholipids (e.g. alkyl sulfonates, caprylate, etc.), surfactants (e.g. SDS, polysorbate, non-ionic surfactant, etc.), saccharides (e.g. sucrose, maltose, trehalose, etc.) and polyols (e.g. mannitol, sorbitol, etc.). See, also, Remington's Pharmaceutical Sciences (1990) Mack Publishing Co., Easton, Pa., which is hereby incorporated by reference in its entirety.

[1438] The term “fusion protein” as used herein refers to a polypeptide that comprises an amino acid sequence of an antibody and an amino acid sequence of a heterologous polypeptide or protein (i.e. a polypeptide or protein not normally a part of the antibody (e.g. a non-anti-SARS-CoV-2 spike protein antigen antibody)). The term “fusion” when used in relation to an antibody refers to the joining of a peptide or polypeptide, or fragment, variant and/or derivative thereof, with a heterologous peptide or polypeptide. Preferably, the fusion protein retains the biological activity of the anti-SARS-CoV-2 spike protein antibody.

[1439] The term “heavy chain” when used with reference to an antibody refers to five distinct types, called alpha (α), delta (δ), epsilon (a), gamma (γ) and mu (μ), based on the amino acid sequence of the heavy chain constant domain. These distinct types of heavy chains are well known and give rise to five classes of antibodies, IgA, IgD, IgE, IgG and IgM, respectively, including two subclasses of IgA, namely IgA1 and IgA2 and four subclasses of IgG, namely IgG1, IgG2, IgG3 and IgG4. Preferably the heavy chain is a human heavy chain. In the human population, multiple heavy chain constant region alleles, of each immunoglobulin or immunoglobulin subclass, exist. The nucleotide and amino acid sequences of these allelic variants are accessible on publicly available databases such as IMGT, ENSEMBL Swiss-Prot and Uniprot. Allelic variants may also be identified in various genome sequencing projects. In one example, the antibodies disclosed herein comprise a heavy chain encoded by a IgG1 constant region allele, which includes, but is not limited to, human IGHG1*01, IGHG1*02, IGHG1*03, IGHG1*04 and IGHG1*05 (the nucleotide and corresponding amino acid sequences of which are set out in Table 2). In one example, the antibodies disclosed herein comprise a protein encoded by a IgG4 constant region allele, which includes but is not limited to human IGHG4*01, IGHG4*02, IGHG4*03 and IGHG4*04 (the nucleotide and corresponding amino acid sequences of which are set out in Table 2). In another example, the heavy chain is an IgA isotype, human IgA1 or human IgA2, example amino acid sequences for which are shown in Table 2. In another example, the heavy chain is a disabled IgG isotype, e.g. a disabled IgG4. In certain examples, the antibodies comprise a human gamma 4 constant region. In another example, the heavy chain constant region does not bind Fc-γ receptors, and e.g. comprises a Leu235Glu mutation. In another example, the heavy chain constant region comprises a Ser228Pro mutation to increase stability. In another example, the heavy chain constant region is IgG4-PE. In another example, the antibodies disclosed herein comprise a heavy chain constant region encoded by a murine IgG1 constant region allele, which includes but is not limited to mouse IGHG1*01 or IGHG1*02.

[1440] The term “host” as used herein refers to an animal, preferably a mammal, and most preferably a human. The term “host cell” as used herein refers to the particular subject cell transfected with a nucleic acid molecule and the progeny or potential progeny of such a cell. Progeny of such a cell may not be identical to the parent cell transfected with the nucleic acid molecule due to mutations or environmental influences that may occur in succeeding generations or integration of the nucleic acid molecule into the host cell genome.

[1441] The term “in combination” in the context of the administration of other therapies refers to the use of more than one therapy. The use of the term “in combination” does not restrict the order in which therapies are administered to a subject with a disease. A first therapy can be administered before (e.g. 1 minute, 45 minutes, 30 minutes, 45 minutes, 1 hour, 2 hours, 4 hours, 6 hours, 12 hours, 24 hours, 48 hours, 72 hours, 96 hours, 1 week, 2 weeks, 3 weeks, 4 weeks, 5 weeks, 6 weeks, 8 weeks, or 12 weeks), concurrently, or after (e.g. 1 minute, 45 minutes, 30 minutes, 45 minutes, 1 hour, 2 hours, 4 hours, 6 hours, 12 hours, 24 hours, 48 hours, 72 hours, 96 hours, 1 week, 2 weeks, 3 weeks, 4 weeks, 5 weeks, 6 weeks, 8 weeks, or 12 weeks) the administration of a second therapy to a subject. Any additional therapy can be administered in any order with the other additional therapies. In certain examples, the antibodies can be administered in combination with one or more therapies.

[1442] As used herein, “injection device” refers to a device that is designed for carrying out injections, an injection including the steps of temporarily fluidically coupling the injection device to a person's tissue, typically the subcutaneous tissue. An injection further includes administering an amount of liquid drug into the tissue and decoupling or removing the injection device from the tissue. In some examples, an injection device can be an intravenous device or IV device, which is a type of injection device used when the target tissue is the blood within the circulatory system, e.g. the blood in a vein. A common, but non-limiting example of an injection device is a needle and syringe.

[1443] As used herein, “instructions” refers to a display of written, printed or graphic matter on the immediate container of an article, for example the written material displayed on a vial containing a pharmaceutically active agent, or details on the composition and use of a product of interest included in a kit containing a composition of interest. Instructions set forth the method of the treatment as contemplated to be administered or performed.

[1444] An “isolated” or “purified” antibody or protein is one that has been identified, separated and/or recovered from a component of its production environment (e.g. natural or recombinant). For example, the antibody or protein is substantially free of cellular material or other contaminating proteins from the cell or tissue source from which the antibody is derived, or substantially free of chemical precursors or other chemicals when chemically synthesized. The language “substantially free of cellular material” includes preparations of an antibody in which the antibody is separated from cellular components of the cells from which it is isolated or recombinantly produced. Thus, an antibody that is substantially free of cellular material includes preparations of antibody having less than about 30%, 20%, 10%, or 5% (by dry weight) of heterologous protein (also referred to herein as a “contaminating protein”). When the antibody is recombinantly produced, it is also preferably substantially free of culture medium, i.e. culture medium represents less than about 20%, 10%, or 5% of the volume of the protein preparation. When the antibody is produced by chemical synthesis, it is preferably substantially free of chemical precursors or other chemicals, i.e., it is separated from chemical precursors or other chemicals which are involved in the synthesis of the protein. Accordingly, such preparations of the antibody have less than about 30%, 20%, 10%, 5% (by dry weight) of chemical precursors or compounds other than the antibody of interest. In a preferred example, antibodies are isolated or purified.

[1445] The terms “Kabat numbering,” and like terms are recognized in the art and refer to a system of numbering amino acid residues which are more variable (i.e. hypervariable) than other amino acid residues in the heavy chain variable regions of an antibody, or an antigen binding portion thereof (Kabat et al., (1971) Ann. NY Acad. Sci., 190:382-391 and, Kabat et al. (1991) Sequences of Proteins of Immunological Interest, Fifth Edition, U.S. Department of Health and Human Services, NIH Publication No. 91-3242). For the heavy chain variable region, the hypervariable region typically ranges from amino acid positions 31 to 35 for CDR1, amino acid positions 50 to 65 for CDR2, and amino acid positions 95 to 102 for CDR3.

[1446] “Label” or “labelled” as used herein refers to the addition of a detectable moiety to a polypeptide, for example, a radiolabel, fluorescent label, enzymatic label, chemiluminescent label or a biotinyl group or gold. Radioisotopes or radionuclides may include 3H, 14C, 15N, 35S, 90Y, 99Tc, 115In, 1251, 1311, fluorescent labels may include rhodamine, lanthanide phosphors or FITC and enzymatic labels may include horseradish peroxidase, β-galactosidase, luciferase, alkaline phosphatase. Additional labels include, by way of illustration and not limitation: enzymes, such as glucose-6-phosphate dehydrogenase (“G6PDH”), alpha-D-galactosidase, glucose oxydase, glucose amylase, carbonic anhydrase, acetylcholinesterase, lysozyme, malate dehydrogenase and peroxidase; dyes (e.g. cyanine dyes, e.g. Cy5TM, Cy5.5TM. or Cy7TM); additional fluorescent labels or fluorescers include, such as fluorescein and its derivatives, fluorochrome, GFP (GFP for “Green Fluorescent Protein”), other fluorescent proteins (e.g. mCherry, mTomato), dansyl, umbelliferone, phycoerythrin, phycocyanin, allophycocyanin, o-phthaldehyde, and fiuorescamine; fluorophores such as lanthanide cryptates and chelates e.g. Europium etc (Perkin Elmer and Cisbio Assays); chemoluminescent labels or chemiluminescers, such as isoluminol, luminol and the dioxetanes; sensitisers; coenzymes; enzyme substrates; particles, such as latex or carbon particles; metal sol; crystallite; liposomes; cells, etc., which may be further labelled with a dye, catalyst or other detectable group; molecules such as biotin, digoxygenin or 5-bromodeoxyuridine; toxin moieties, such as for example a toxin moiety selected from a group of Pseudomonas exotoxin (PE or a cytotoxic fragment or mutant thereof), Diptheria toxin or a cytotoxic fragment or mutant thereof, a botulinum toxin A, B, C, D, E or F, ricin or a cytotoxic fragment thereof e.g. ricin A, abrin or a cytotoxic fragment thereof, saporin or a cytotoxic fragment thereof, pokeweed antiviral toxin or a cytotoxic fragment thereof and bryodin 1 or a cytotoxic fragment thereof.

[1447] The term “light chain” when used in reference to an antibody refers to the immunoglobulin light chains, of which there are two types in mammals, lambda (λ) and kappa (κ). Preferably, the light chain is a human light chain. Preferably the light chain constant region is a human constant region. In the human population, multiple light chain constant region alleles exist. The nucleotide and amino acid sequences of these allelic variants are accessible on publicly available databases such as IMGT, ENSEMBL, Swiss-Prot and Uniprot. In one example, the antibodies disclosed herein comprise a protein encoded by a human K constant region allele, which includes, but is not limited to, IGKC*01, IGKC*02, IGKC*03, IGKC*04 and IGKC*05 (the nucleotide and corresponding amino acid sequences of which are set out in Table 2). In one example, the antibodies disclosed herein comprise a protein encoded by a human, constant region allele, which includes but is not limited to IGLC1*01, IGLC1*02, IGLC2*01, IGLC2*02, IGLC2*03, IGLC3*01, IGLC3*02, IGLC3*03, IGLC3*04, IGLC6*01, IGLC7*01, IGLC7*02, and IGLC7*03 (the nucleotide and corresponding amino acid sequences of which are set out in Table 2). In another example, the antibodies disclosed herein comprise a light chain constant region encoded by a mouse K constant region allele, which includes, but is not limited to, IGKC*01, IGKC*03 or IGKC*03 (the nucleotide and corresponding amino acid sequences of which are set out in Table 2). In another example, the antibodies disclosed herein comprise a light chain constant region encoded by a mouse a constant region allele, which includes, but is not limited to, IGLC1*01, IGLC2*01 or IGLC3*01 (the nucleotide and corresponding amino acid sequences of which are set out in Table 2).

[1448] “Percent (%) amino acid sequence identity” with respect to a peptide, polypeptide or antibody sequence are defined as the percentage of amino acid residues in a candidate sequence that are identical with the amino acid residues in the specific peptide or polypeptide sequence, after aligning the sequences and introducing gaps, if necessary, to achieve the maximum percent sequence identity, and not considering any conservative substitutions as part of the sequence identity. Alignment for purposes of determining percent amino acid sequence identity can be achieved in various ways that are within the skill in the art, for instance, using publicly available computer software such as BLAST, BLAST-2, ALIGN or MEG ALIGN™ (DNASTAR) software. In one example, the % identity is about 70%. In one example, the % identity is about 75%. In one example, the % identity is about 80%. In one example, the % identity is about 85%. In one example, the % identity is about 90%. In one example, the % identity is about 92%. In one example, the % identity is about 95%. In one example, the % identity is about 97%. In one example, the % identity is about 98%. In one example, the % identity is about 99%. In one example, the % identity is 100%.

[1449] The term “naturally occurring” or “native” when used in connection with biological materials such as nucleic acid molecules, polypeptides, host cells, and the like, refers to those which are found in nature and not manipulated by a human being.

[1450] As used herein, “packaging” refers to how the components are organized and/or restrained into a unit fit for distribution and/or use. Packaging can include, e.g. boxes, bags, syringes, ampoules, vials, tubes, clamshell packaging, barriers and/or containers to maintain sterility, labelling, etc.

[1451] The term “pharmaceutically acceptable” as used herein means being approved by a regulatory agency of the Federal or a state government, or listed in the U.S. Pharmacopeia, European Pharmacopeia or other generally recognized Pharmacopeia for use in animals, and more particularly in humans.

[1452] As used herein, the term “polynucleotide,” “nucleotide,” nucleic acid” “nucleic acid molecule” and other similar terms are used interchangeable and include DNA, RNA, mRNA and the like.

[1453] As used herein, the terms “prevent”, “preventing”, and “prevention” refer to the total or partial inhibition of the development, recurrence, onset or spread of a SARS-CoV-2 related disease, such as COVID-19,and/or symptom related thereto, resulting from the administration of a therapy or combination of therapies provided herein (e.g. a combination of prophylactic or therapeutic agents, such as an antibody).

[1454] The term “soluble” refers to a polypeptide that is lacking one or more transmembrane or cytoplasmic domains found in the native or membrane-associated form. In one example, the “soluble” form of a polypeptide lacks both the transmembrane domain and the cytoplasmic domain.

[1455] The term “subject” or “patient” refers to any animal, including, but not limited to, mammals. As used herein, the term “mammal” refers to any vertebrate animal that suckle their young and either give birth to living young (eutharian or placental mammals) or are egg-laying (metatharian or nonplacental mammals). Examples of mammalian species include, but are not limited to, humans and other primates, including non-human primates such as chimpanzees and other apes and monkey species; farm animals such as cattle, sheep, pigs, goats and horses; domestic mammals such as dogs and cats; laboratory animals including rodents such as mice, rats (including cotton rats) and guinea pigs; birds, including domestic, wild and game birds such as chickens, turkeys and other gallinaceous birds, ducks, geese, and the like.

[1456] As used herein “substantially all” refers to refers to at least about 60%, at least about 70%, at least about 75%, at least about 80%, at least about 85%, at least about 90%, at least about 95%, at least about 98%, at least about 99%, or about 100%.

[1457] The term “surfactant” as used herein refers to organic substances having amphipathic structures; namely, they are composed of groups of opposing solubility tendencies, typically an oil-soluble hydrocarbon chain and a water-soluble ionic group. Surfactants can be classified, depending on the charge of the surface-active moiety, into anionic, cationic, and non-ionic surfactants. Surfactants are often used as wetting, emulsifying, solubilizing, and dispersing agents for various pharmaceutical compositions and preparations of biological materials.

[1458] As used herein, the term “tag” refers to any type of moiety that is attached to, e.g. a polypeptide and/or a polynucleotide that encodes a SARS-CoV-2 antibody. For example, a polynucleotide that encodes a SARS-CoV-2 antibody can contain one or more additional tag-encoding nucleotide sequences that encode e.g. a detectable moiety or a moiety that aids in affinity purification. When translated, the tag and the antibody can be in the form of a fusion protein. The term “detectable” or “detection” with reference to a tag refers to any tag that is capable of being visualized or wherein the presence of the tag is otherwise able to be determined and/or measured (e.g. by quantitation). A non-limiting example of a detectable tag is a fluorescent tag.

[1459] As used herein, the term “therapeutic agent” refers to any agent that can be used in the treatment, management or amelioration of a SARS-CoV-2-related disease or condition, such as COVID-19 and/or a symptom related thereto. In certain examples, the term “therapeutic agent” refers to an antibody. In certain other examples, the term “therapeutic agent” refers to an agent other than an antibody. Preferably, a therapeutic agent is an agent which is known to be useful for, or has been or is currently being used for the treatment, management or amelioration of a SARS-CoV-2-related disease or condition, such as COVID-19 and/or one or more symptoms related thereto. In specific examples, the therapeutic agent is an anti-SARS-CoV-2 antibody. In specific examples, the therapeutic agent is a fully human anti-SARS-CoV-2 antibody, such as a fully human SARS-CoV-2 monoclonal antibody.

[1460] As used herein, the term “therapy” refers to any protocol, method and/or agent that can be used in the prevention, management, treatment and/or amelioration of a SARS-CoV-2-related disease or condition, such as COVID-19. In certain examples, the terms “therapies” and “therapy” refer to a biological therapy, supportive therapy, and/or other therapies useful in the prevention, management, treatment and/or amelioration of a SARS-CoV-2-related disease or condition, such as COVID-19 known to one of skill in the art such as medical personnel.

[1461] The terms “treat”, “treatment” and “treating” refer to the reduction or amelioration of the progression, seventy, and/or duration of a SARS-CoV-2-related disease or condition, such as COVID-19 resulting from the administration of one or more therapies (including, but not limited to, the administration of one or more prophylactic or therapeutic agents, such as an antibody). In specific examples, such terms refer to the reduction or inhibition of the binding of SARS-CoV-2 to ACE 2, and/or the inhibition or reduction of one or more symptoms associated with a SARS-CoV-2-related disease or condition, such as COVID-19.

[1462] The term “variable region” or “variable domain” refers to a portion of the light and heavy chains, typically about the amino-terminal 120 to 130 amino acids in the heavy chain and about 100 to 110 amino acids in the light chain, which differ extensively in sequence among antibodies and are used in the binding and specificity of each particular antibody for its particular antigen. The variability in sequence is concentrated in those regions called complimentarily determining regions (CDRs) while the more highly conserved regions in the variable domain are called framework regions (FR). The CDRs are primarily responsible for the interaction of the antibody with antigen. Numbering of amino acid positions used herein is according to IMGT (Lefranc MP “IMGT unique numbering for immunoglobulin and T cell receptor variable domains and Ig superfamily V-like domains”, Dev. Comp. Immunol. 27(1):55-77 (2003)). In preferred examples, the variable region is a human variable region.

[1463] Definitions of common terms in cell biology and molecular biology can be found in “The Merck Manual of Diagnosis and Therapy”, 19th Edition, published by Merck Research Laboratories, 2006 (ISBN 0-911910-19-0); Robert S. Porter et al. (eds.), The Encyclopedia of Molecular Biology, published by Blackwell Science Ltd., 1994 (ISBN 0-632-02182-9); Benjamin Lewin, Genes X, published by Jones & Bartlett Publishing, 2009 (ISBN-10: 0763766321); Kendrew et al. (Eds.), Molecular Biology and Biotechnology: a Comprehensive Desk Reference, published by VCH Publishers, Inc., 1995 (ISBN 1-56081-569-8) and Current Protocols in Protein Sciences 2009, Wiley Intersciences, Coligan et al., eds.

[1464] Unless otherwise stated, the present disclosure was performed using standard procedures, as described, for example in Sambrook et al., Molecular Cloning: A Laboratory Manual (4 ed.), Cold Spring Harbor Laboratory Press, Cold Spring Harbor, N.Y., USA (2012); Davis et al., Basic Methods in Molecular Biology, Elsevier Science Publishing, Inc., New York, USA (1995); or Methods in Enzymology: Guide to Molecular Cloning Techniques Vol. 152, S. L. Berger and A. R. Kimmel Eds., Academic Press Inc., San Diego, USA (1987); Current Protocols in Protein Science (CPPS) (John E. Coligan, et al., ed., John Wiley and Sons, Inc.), Current Protocols in Cell Biology (CPCB) (Juan S. Bonifacino et al. ed., John Wiley and Sons, Inc.), and Culture of Animal Cells: A Manual of Basic Technique by R. Ian Freshney, Publisher: Wiley-Liss; 5th edition (2005), Animal Cell Culture Methods (Methods in Cell Biology, Vol. 57, Jennie P. Mather and David Barnes editors, Academic Press, 1st edition, 1998) which are all incorporated by reference herein in their entireties.

[1465] Other terms are defined herein within the description of the various examples of the disclosure.

### Anti-SARS-COV-2 Antibodies

[1466] The antibodies described herein are described with respect to the following concepts, aspects, sentences, arrangements and embodiments. Unless otherwise stated, all concepts, embodiments, sentences, arrangements and aspects are to be read as being able to be combined with any other concept, aspect, sentence, arrangement or embodiment, unless such combination would not make technical sense or is explicitly stated otherwise.

### Binding—Location:

[1467] Antibodies that specifically bind the spike protein of SARS-CoV-2 are provided. In particular, neutralising antibodies, which inhibit or prevent SARS-CoV-2 from entering cells are provided. In some aspects the antibodies specifically bind the S 1 subunit of the SARS-CoV-2 spike protein. For example, antibodies may bind the receptor binding domain (RBD) of the S1 subunit of the SARS-CoV-2 spike protein. Such antibodies binding the RBD may or may not compete with ACE2 for binding to SARS-Cov-2 and thus may or may not directly inhibit binding of SARS-CoV-2 to its receptor ACE2. Alternatively, the antibodies may preferentially bind to the trimer form of the SARS-CoV-2 spike protein. Alternatively, the antibodies may specifically bind the S2 subunit of the SARS-CoV-2 spike protein.

[1468] The spike protein and its domain and subunit structure are illustrated in FIG. 1, FIG. 2A and FIG. 2B, and reference herein to the S1 subunit, S2 subunit, RBD, NTD, extracellular domain and trimer refer to the wild-type spike protein in FIG. 2A unless stated otherwise or unless indicated by context. It will be appreciated that, as the epidemic has spread, vast numbers of different strains of SARS-CoV-2, comprising a variety of mutations, are now at large in the population and that these include spike proteins with a number of mutations relative to the defined wild-type of FIG. 2A. One such mutation is D614G (i.e., substitution of glycine for aspartic acid at residue 614 of the spike protein) which is now present in the majority of clinical isolates of SARS-CoV-2. Preferably, antibodies ofthe present invention bind SARS-CoV-2 D614G with at least the affinity with which they bind SARS-CoV-2614D. This residue lies between the RBD and S2 domains and is thus not present in soluble preparations of these domains, but anti-RBD and anti-S2 antibodies may be tested for binding to the spike protein trimer to confirm maintenance of binding to the D614G form. Similarly, neutralisation assays may be performed with SARS-CoV-2 spike D614G to confirm neutralising potency.

[1469] An antibody of the present invention may be one which competes for binding to the isolated soluble RBD subunit with any anti-RBD IMPI antibody described herein, such as IMPI-059, IMPI-017 or IMPI-004.

[1470] An antibody of the present invention may be one which competes for binding to the isolated soluble RBD subunit with any anti-RBD YANG antibody described herein, such as YANG-1112, YANG-2107, YANG-2108, YANG-2111, and YANG-1401.

[1471] An antibody of the present invention may be one which competes for binding to the isolated soluble S2 subunit with any anti-S2 IMPI antibody described herein, such as IMPI-013.

[1472] An antibody of the present invention may be one which competes for binding to the isolated soluble S2 subunit with any anti-S2 YANG antibody described herein, such as YANG-2203, YANG-2204, YANG-2205, YANG-2206, YANG-2207, or YANG-2208.

[1473] An antibody of the present invention may be one which competes for binding to the isolated soluble S2 subunit with any anti-NTD YANG antibody described herein, YANG-1301, YANG-1302, YANG-1303, YANG-1304, YANG-1305; YANG-2301, YANG-2302, YANG-2303, YANG-2304, YANG-2305, or YANG-2306.

[1474] An antibody of the present invention may be one which competes for binding to the SARS-CoV-2 spike protein trimer with any IMPI antibody described herein, optionally with a “trimer-only” binding antibody.

[1475] Methods of determining competition between molecules are described elsewhere herein (e.g., SPR) and may be performed with the test antibody and IMPI antibody in IgG format or optionally in scFv format.

[1476] Methods of determining competition between molecules are described elsewhere herein (e.g., SPR) and may be performed with the test antibody and YANG antibody in IgG format or optionally in scFv format.

### Binding—Measurement:

[1477] Any suitable method may be used to determine whether an antibody binds to the SARS-CoV-2 spike protein. Such a method may comprise surface plasmon resonance (SPR), bio-layer interferometry, or an ELISA to determine specificity of antibodies. An antibody may be said to bind its antigen if the level of binding to antigen is at least 2.5 fold greater, e.g., at least 10 fold greater, than binding to a control antigen. Binding between an antibody and its cognate antigen is often referred to as specific binding. Precise identification of the residues bound by an antibody can usually be obtained using x-ray crystallography. This technique may be used to determine that an antibody described herein binds one or more residues of SARS-CoV-2 spike protein.

[1478] Ability of an antibody to bind its target antigen, and the specificity and affinity of that binding (KD, Kd and/or Ka) can be determined by any routine method in the art, e.g. using surface plasmon resonance (SPR), such as by Biacore™ (Cytiva Life Sciences) or using the ProteOn XPR36™ (Bio-Rad®), using KinExA® (Sapidyne Instruments, Inc), or using ForteBio Octet (Pall ForteBio Corp.).

[1479] The term “KD”, as used herein, is intended to refer to the equilibrium dissociation constant of a particular antibody-antigen interaction. Affinity of antibody-antigen binding may be determined, e.g., by SPR. Affinity may also be determined by bio-layer interferometry. Examples of affinity determination by SPR are provided in Example 6 herein. In some examples, an antibody may bind to a SARS-CoV-2 spike protein with an affinity (KD) of 1 mM or less, preferably less than 50 nM, less than 40 nM, less than 30 nM, less than 20 nM, as determined by SPR. In other examples, the antibody may bind to SARS-CoV-2 spike protein with a KD of less than 10 nM (e.g. less than 9 nM, less than 8 nM, less than 7 nM, less than 6 nM, less than 5 nM, less than 4 nM, less than 3 nM, less than 2 nM or less than 1 nM as determined by SPR. Preferably the KD may be less than 1 nM as determined by SPR. The KD may be 0.9 nM or less, 0.8 nM or less, 0.7 nM or less, 0.6 nM or less, 0.5 nM or less, 0.4 nM or less, 0.3 nM or less, 0.2 nM or less, or 0.1 nM or less, as determined by SPR. In some examples, an antibody may bind to a SARS-CoV-2 spike protein with KD of 0.1 nM or less, as determined by SPR. In some examples, an antibody may bind to a SARS-CoV-2 spike protein with a KD of 50 pM or less, as determined by SPR. Binding and binding affinity can be determined to various purified spike proteins and sub-domains, for example, the wild type trimer spike protein (FIG. 2A), the trimer stabilised by proline mutations (FIG. 2B), mutations to the trimeric spike protein observed in clinical isolates, for example D614G, expressed and purified sub-domains of the trimers, such as the S1 subunit or the S2 subunit, or the Receptor binding domain (RBD) or the N-terminal domain (NTD) or any of the above sub-domains with mutations observed from clinical isolates. If the antibody epitope is a linear continuous epitope, then binding and binding affinity can be determined using synthetic purified peptide sequences.

[1480] In one example, the antibody binds to the SARS-CoV-2 spike protein with an affinity of less than 1 nM (e.g. from 1 nM to 0.01 pM or from 1 nM to 0.1 pM, or from 1 nM to 1 pM), as determined by SPR. In one example, the antibody binds to the SARS-CoV-2 spike protein with an affinity of less than 10 nM (e.g. from 10 nM to 0.01 pM or from 10 nM to 0.1 pM, or from 10 nM to 1 pM), as determined by SPR. In one example, the antibody binds to the SARS-CoV-2 spike protein with an affinity of less than 0.1 nM (e.g. from 0.1 nM to 0.01 pM or from 0.1 nM to 0.1 pM, or from 0.1 nM to 1 pM), as determined by SPR. In one example, the antibody binds to SARS-CoV-2 spike protein with an affinity of less than 0.01 nM (e.g. from 0.011 nM to 0.01 pM or from 0.01 nM to 0.1 pM), as determined by SPR. In another example, the KD is within a range of 0.01 to 1 nM, or a range of 0.05 to 2 nM, or a range of 0.05 to lnM, as determined by SPR.

[1481] In one example, the SPR is carried out at 25° C. A suitable SPR protocol is set out in detail in Example 6.

[1482] In brief, the affinity of the antibody can be determined using SPR by:
[1483] 1. Coupling mouse anti-human (or other relevant human, rat or non-human vertebrate antibody constant region species-matched) IgG to a biosensor chip (e.g. dextran-coated gold chip) such as by primary amine coupling. Thus, an anti-Fc antibody may be covalently immobilised on the chip surface using amine coupling.
[1484] 2. Exposing the mouse anti-human IgG (or other matched species antibody) to the test antibody (e.g., in human IgG format) to capture the test antibody on the chip;
[1485] 3. Passing the test antigen over the chip's capture surface at a series of concentrations up to a maximum of 100 nM, e.g., at 0.39, 1.56, 6.25, 25 and 100 nM, and a 0 nM (i.e. buffer alone) control run. The buffer may optionally be 0.01 M HEPES (4-(2-hydroxyethyl)-1-piperazineethanesulfonic acid), 0.15 M NaCl and 0.05% v/v surfactant P20 in aqueous solution, buffered to pH 7.4; and
[1486] 4. Determining the affinity of binding of test antibody to test antigen using surface plasmon resonance. KD, Ka and Kd may then be calculated.
   SPR can be carried out using any standard SPR apparatus, such as by Biacore™ or using the ProteOn XPR36™ (Bio-Rad®).
   Regeneration of the capture surface can be carried out with 3 M magnesium chloride solution. This removes the captured test antibody and allows the surface to be used for another interaction. The binding data can be fitted to 1:1 model inherent using standard techniques, e.g. using analysis software such as Biacore Insight Evaluation Software.

### Cross-Reactivity:

[1487] In some examples, an antibody that specifically binds to a SARS-CoV-2 spike protein antigen does not cross-react with other antigens (but may optionally cross-react with SARS-CoV spike protein and/or MERS-CoV spike protein). In some examples, an antibody that specifically binds to a SARS-CoV-2 spike protein antigen does not cross react with the existing endemic seasonal coronaviruses (NL63, 229E, OC43 and HKU1).

[1488] In some examples, an antibody that specifically binds to a SARS-CoV-2 spike protein antigen cross-reacts with SARS-CoV spike protein. In some examples, an antibody that specifically binds to a SARS-CoV-2 spike protein antigen cross-reacts with MERS spike protein. In some examples, an antibody that specifically binds to a SARS-CoV-2 spike protein antigen cross-reacts with SARS-CoV spike protein and MERS spike protein.

[1489] For antibodies that specifically bind to a SARS-CoV-2 spike protein antigen and cross-react with SARS-CoV spike protein and/or MERS spike protein, in some examples, the antibody may bind SARS-CoV-2 spike protein with at least a 10 fold greater binding affinity than to SARS-CoV spike protein and/or MERS spike protein (e.g. as measured by SPR). In some examples, the antibody may bind SARS-CoV-2 spike protein with at least a 20 fold greater binding affinity than to SARS-CoV spike protein and/or MERS spike protein (e.g. as measured by SPR). In some examples, the antibody may bind SARS-CoV-2 spike protein with at least a 50 fold greater binding affinity than to SARS-CoV spike protein and/or MERS spike protein (e.g. as measured by SPR).

### Function—Inhibition, Neutralisation, Etc:

[1490] Antibodies described herein are inhibitory antibodies that inhibit a function of the SARS-CoV-2 spike protein, thus being useful in therapy and prophylaxis to prevent infection. In an example, the antibodies inhibit or prevent SARS-CoV-2 entering cells. In an example, the antibodies are neutralising antibodies.

[1491] In some examples, the antibodies inhibit the SARS-CoV-2 spike protein binding to the human ACE2 receptor. Inhibition of SARS-CoV-2 spike protein binding to the human ACE2 receptor may be achieved by an antibody directly blocking the epitope on the SARS-CoV-2 spike protein which binds to the human ACE2 receptor. Such antibodies may compete for binding to SARS-CoV-2 spike protein with the human ACE2 receptor, as described further below. Alternatively, inhibition of SARS-CoV-2 spike protein binding to the human ACE2 receptor may be achieved by an indirect mechanism, e.g. where an antibody binds to an epitope of the SARS-CoV-2 spike protein outside of the epitope on the SARS-CoV-2 spike protein which binds to the human ACE2 receptor, but which modifies the structure or function of the spike protein such that binding to human ACE2 receptor is reduced or prevented or the process of infecting the cell after ACE2 receptor binding is inhibited.

[1492] Human ACE2 (angiotensin-converting enzyme 2) is encodable by the mRNA sequence deposited in GenBank under accession number AB193259.1. ACE2 having the amino acid sequence from this accession number may be used in assays herein. The expression vector pCAGGS-ACE2 which was used in Examples herein comprised this coding sequence.

[1493] Human TMPRSS2 (transmembrane serine protease 2), which cleaves the spike protein, is encodable by the mRNA sequence deposited under NCBI reference sequence NM_001135099.1. TMPRSS2 having the amino acid sequence from this accession number may be used in assays herein. The expression vector pCAGGS-TMPRSS2 which was used in Examples herein comprised this coding sequence.

[1494] An inhibitory or neutralising antibody may bind either ofthe subunits (S1 or S2) of the SARS-CoV-2 spike protein. An inhibitory or neutralising antibody may bind any of the domains of the S1 subunit (e.g. RTB or NTD or a non-RBD/NTD domain) of the SARS-CoV-2 spike protein. Thus, in some examples, an inhibitory antibody that specifically binds to the receptor binding domain (RBD) of the SARS-CoV-2 spike protein is provided. In some examples, a neutralising antibody that specifically binds to the receptor binding domain (RBD) of the SARS-CoV-2 spike protein is provided. In some examples, an antibody that specifically binds to the receptor binding domain (RBD) of the SARS-CoV-2 spike protein, wherein the antibody inhibits or prevents SARS-CoV-2 entering cells is provided. In other examples, an inhibitory antibody that specifically binds to the S2 subunit of the SARS-CoV-2 spike protein is provided. In some examples, a neutralising antibody that specifically binds to the S2 subunit of the SARS-CoV-2 spike protein is provided. In some examples, an antibody that specifically binds to the S2 subunit of the SARS-CoV-2 spike protein, wherein the antibody inhibits or prevents SARS-CoV-2 entering cells is provided.

### Neutralisation—Measurement:

[1495] The ability of an antibody to neutralise SARS-CoV-2 entry to cells may be determined by in vitro assays. A widely used assay is the pseudovirus neutralisation assay, which uses a non-replication-competent virus-like particle with the SARS-CoV-2 spike protein within the virus envelope. Pseudotyped virus neutralisation assays using replication-deficient viruses are commonly used as a replacement for the use of wild-type viruses when studying pathogenic human viruses, which would otherwise need to be handled at higher levels of containment. The neutralizing ability of an antibody can be measured in a pseudotype neutralization assay using spike SARS-CoV-2 enveloped lentiviral pseudotypes carrying a firefly luciferase reporter. The use of such a reporter results in a wide dynamic range of neutralization titers and a high level of sensitivity. When the lentiviral genome integrates after entry into cells, firefly luciferase expression and activity is proportional to the number of cells that were infected (transduced) by the pseudotyped virus.

[1496] The pseudotype neutralization assay described herein, and detailed in Example 4, is a cell-based viral neutralization assay that is performed in a 384-well format. For the SARS-CoV-2 pseudotype neutralization, LentiX 293T cells (ATCC, CRL-3216) are used which are cultured and maintained in DMEM with 10% FBS added. The cells are prepared on day one, 24h later the cells are transiently transfected to express ACE2 (the SARS-CoV-2 viral receptor) and TMPRSS2 (the protease required for viral entry). After 24 h the ACE2/TMPRSS2 transiently transfected target cells are ready for use.

[1497] Serial dilutions of antibodies are prepared in a 384-well format and incubated with an appropriate titre (50-100 TCID50) of lentiviral particles for one hour at 37° C. The starting concentration of antibodies ranges from 50 nm to 100 nM, upon which 3- to 5-fold 8-point dilutions are performed. Each assay includes the following controls: cells only, cells and pseudovirus, positive and negative control antibodies.

[1498] After one hour, ACE2/TMPRSS2 transiently transfected target cells are added to the wells and the plates are incubated for 48 h at 37° C. to permit cell infection (transduction) of non-neutralized particles and expression of firefly luciferase. Following the 48h incubation cells are lysed for 5 min in the presence of a luciferase substrate (e.g., Bright-Glo Luciferase Assay System (Promega)) to assess luciferase activity. After this 5 min incubation at room temperature the luminescence in each well is measured.

[1499] The comparison between the luciferase signal detected in uninfected (untransduced) cells, in cells infected (transduced) with pseudotypes only, and in cells infected (transduced) with pseudotypes in the presence of antibodies, enables us to determine if the antibody has neutralizing activity against the SARS-CoV-2 pseudotype tested.

[1500] Alternatively, the ability of an antibody to neutralise wild type, replication competent, authentic SARS-CoV-2 entry to cells may be determined by in vitro assays which are known as live virus assays. The live virus assay involves producing a laboratory stock of SARS-CoV-2 virus from an isolate ofthe virus derived from an infected person. Each isolate from different people results in a different live virus stock, which will normally have the full virus genome sequence determined to ensure the virus is not defective in any gene and to determine where, if anywhere the virus isolate differs genetically from the wild type virus genome sequence and if the genetic changes alter the amino acid sequence of a virus protein. Live virus isolates can be produced by culturing the SARS-CoV-2 virus on human cells or on animal cells in vitro, providing the cells are permissive to virus replication. Two known factors that confer permissivity are the ACE-2 receptor and the cell surface protein TMPRSS2. Some primary human cells naturally express these proteins, such as primary human airway epithelial cells (PAE cells), some cancer cell lines naturally express these proteins, such as Caco-2 and Calu-3, some human cells can be made to express these proteins artificially such as 293T cells transiently transfected to express ACE2 (the SARS-CoV-2 viral receptor) and TMPRSS2 and some animal cells are naturally permissive to SARS-CoV-2 such as Vero E6 cells from the African Green Monkey. Therefore, all live virus assays are related but often with specific differences. The neutralizing ability of an antibody can be measured in a live virus neutralization assay by incubating a known fixed amount of the live virus with different dilutions of the antibody, and then following incubation, adding the mixture to cells that are permissive for SARS-CoV-2 infection. The cells are then incubated to allow virus infection and replication to occur. Detection of virus infection and replication can be determined by a number of methods, including, colourimetry detection and quantitation of infected cells using labelled antibodies to a SAR-CoV-2 protein such as the Nucleoprotein (N), or visualisation of infected cell foci by staining and enumeration of cells stained with a labelled antibody to a SAR-CoV-2 protein such as the Nucleoprotein (N). The amount of reduction in cell infection caused by an antibody is calculated relative to a control infection where no antibody is added. These assays can be performed in 24, 48 or 96 well tissue culture plates.

[1501] The neutralising ability of an antibody of the invention can be determined in vitro according to the methods for pseudovirus neutralisation and/or live virus neutralisation. In both cases the concentration of the antibody, expressed as either or both of the antibody weight (milligrams, or micrograms, or nanograms or picograms) in a given volume (litre or millilitre or microlitre), or as a molarity of the antibody (millimolar, or micromolar or nanomolar or picomolar), that is required to inhibit 50% of the detectable infection in the assay (the inhibitory concentration for 50%, or IC50) or inhibit 90% of the detectable infection in the assay (the inhibitory concentration for 90%, or IC90) or inhibit 95% of the detectable infection in the assay (the inhibitory concentration for 95%, or IC95) is reported. This can be calculated using any of a variety of methods known to the art, including the fitting of inhibition curves mathematically to the experimentally derived data and reporting these as an IC50 or IC90 or IC95. Finally, the antibody concentration that completely inhibits SARS-CoV-2 infection of cells can be determined. This value will be similar to the IC95 value and this was determined for the data in Table E5-1.

[1502] An example protocol for the pseudovirus neutralisation assay is provided in Example 4 herein.

[1503] In some examples, the antibodies neutralise SARS-CoV-2 with an IC50 of 10 nM or lower (e.g. as determined in a pseudovirus assay). In some examples, the antibodies neutralise SARS-CoV-2 with an IC50 of lnM or lower (e.g. as determined in a pseudovirus assay). In some examples, the antibodies neutralise SARS-CoV-2 with an IC50 of 500 pM or lower (e.g. as determined in a pseudovirus assay). In some examples, the antibodies neutralise SARS-CoV-2 with an IC50 of 100 pM or lower (e.g. as determined in a pseudovirus assay). In some examples, the antibodies neutralise SARS-CoV-2 with an IC50 of 50 pM or lower (e.g. as determined in a pseudovirus assay). In some examples, the antibodies neutralise SARS-CoV-2 with an IC50 of 40 pM or lower (e.g. as determined in a pseudovirus assay). In some examples, the antibodies neutralise SARS-CoV-2 with an IC50 of 30 pM or lower (e.g. as determined in a pseudovirus assay). In some examples, the antibodies neutralise SARS-CoV-2 with an IC50 of 20 pM or lower (e.g. as determined in a pseudovirus assay). In some examples, the antibodies neutralise SARS-CoV-2 with an IC50 of 10 pM or lower (e.g. as determined in a pseudovirus assay). In some examples, the antibodies neutralise SARS-CoV-2 with an IC50 of 5 pM or lower (e.g. as determined in a pseudovirus assay).

[1504] In some examples, the antibodies neutralise SARS-CoV-2 with an IC50 of 10 nM or lower (e.g. as determined in a live virus assay). In some examples, the antibodies neutralise SARS-CoV-2 with an IC50 of lnM or lower (e.g. as determined in a live virus assay). In some examples, the antibodies neutralise SARS-CoV-2 with an IC50 of 500 pM or lower (e.g. as determined in a live virus assay). In some examples, the antibodies neutralise SARS-CoV-2 with an IC50 of 100 pM or lower (e.g. as determined in a live virus assay). In some examples, the antibodies neutralise SARS-CoV-2 with an IC50 of 50 pM or lower (e.g. as determined in a live virus assay). In some examples, the antibodies neutralise SARS-CoV-2 with an IC50 of 40 pM or lower (e.g. as determined in a live virus assay). In some examples, the antibodies neutralise SARS-CoV-2 with an IC50 of 30 pM or lower (e.g. as determined in a live virus assay).

[1505] In some examples, the antibodies may neutralise SARS-CoV-2 with an activity level which is greater than a reference antibody. In some examples, the reference antibody may be SAD S35 (Acro Biosystems; https://www.acrobiosystems.com/P3209-Anti-SARS-CoV-2-RBD-Neutralizing-Antibody-Human-IgG1.html). In some examples, the reference antibody may be 4A8 (Chi et al., Science vol. 369 (6504), 650-655). For example, the antibodies may neutralise SARS-CoV-2 with an activity level which is greater than the reference antibody expressed as fold change relative to the reference antibody. In one example, the antibody may neutralise SARS-CoV-2 with an activity level greater than a 2-fold change relative to the reference antibody. In one example, the antibody may neutralise SARS-CoV-2 with an activity level greater than a 25-fold change relative to the reference antibody. In one example, the antibody may neutralise SARS-CoV-2 with an activity level greater than a 50-fold change relative to the reference antibody. In one example, the antibody may neutralise SARS-CoV-2 with an activity level greater than a 100-fold change relative to the reference antibody. In one example, the antibody may neutralise SARS-CoV-2 with an activity level greater than a 500-fold change relative to the reference antibody. In one example, the antibody may neutralise SARS-CoV-2 with an activity level greater than a 1000-fold change relative to the reference antibody.

[1506] The antibodies provided may inhibit the SARS-CoV-2 spike protein binding to the human ACE2 receptor.

[1507] In some examples, an antibody specifically binds to the receptor binding domain (RBD) of the SARS-CoV-2 spike protein, wherein the antibody inhibits the SARS-CoV-2 spike protein binding to the human ACE2 receptor. Various modes of inhibition may be envisaged. For instance, inhibition may be by competition for binding to ACE2 (whether for the same epitope or by steric hindrance), or inhibition may be through the prevention of RBD becoming in its UP states leading to inhibiting ACE2 interaction with RBD.

[1508] In some examples, an antibody specifically binds to the S2 subunit of the SARS-CoV-2 spike protein, wherein the antibody inhibits a function of the SARS-CoV-2 spike protein binding to the human ACE2 receptor triggering entry into the cell. Again, various modes of inhibition may be envisaged. For example, an anti-S2 antibody may inhibit fusion with the host cell membrane or it may inhibit the cleavage of S1 and S2 by TMPRSS2 or cathepsins or other cellular protease that can modify the spike protein.

Competition with Ace2:

[1509] The antibodies provided may compete with the SARS-CoV-2 spike protein for binding to the human ACE2 receptor. The antibodies provided may specifically bind to the receptor binding domain (RBD) of the SARS-CoV-2 spike protein, wherein the antibody is a neutralising antibody which competes with the SARS-CoV-2 spike protein for binding to the human ACE2 receptor, thereby preventing cell infection. Other antibodies, that do not compete with the SARS-CoV-2 spike protein for binding to the human ACE2 receptor, may alter the ability of the spike protein to function correctly and thereby also be a neutralising antibody even though the antibody does not block RBD and ACE2 interaction.

[1510] Whether an antibody competes with the SARS-CoV-2 spike protein for binding to the human ACE2 receptor may be measured using a competition assay. Competition may be determined by surface plasmon resonance (SPR), such techniques being readily apparent to the skilled person. SPR may be carried out using Biacore™, Proteon™ or another standard SPR technique. Such competition may be due, for example, to the antibodies or fragments binding to identical or overlapping epitopes of the SARS-CoV-2 spike protein to that which the ACE2 receptor binds. In one example, competition is determined by ELISA, such techniques being readily apparent to the skilled person. In one example, competition is determined by homogenous time resolved fluorescence (HTRF), such techniques being readily apparent to the skilled person. In one example, competition is determined by fluorescence activated cell sorting (FACS), such techniques being readily apparent to the skilled person. In one example, competition is determined by ForteBio Octet® Bio-Layer Interferometry (BLI) such techniques being readily apparent to the skilled person.

[1511] In one example, the antibody competes (e.g. in a dose-dependent manner) with SARS-CoV-2 spike protein (or a fusion protein thereof) for binding to cell surface-expressed human ACE2 receptor. In one embodiment, the antibody competes (e.g. in a dose-dependent manner) with SARS-CoV-2 spike protein (or a fusion protein thereof) for binding to soluble human ACE2 receptor.

[1512] In one example, the antibody partially or completely inhibits binding of SARS-CoV-2 spike protein to cell surface-expressed human ACE2 receptor. In another example, the antibody partially or completely inhibits binding of SARS-CoV-2 to soluble human ACE2 receptor.

[1513] If the epitope to which the antagonist antibody binds completely blocks the binding site of the ACE2 receptor, then receptor binding is completely prevented (which may be a physical blocking—in the case of overlapping epitopes—or steric blocking—where the antagonist is large such that it prevents the receptor binding to its distinct epitope). If the epitope to which the antibody binds partially blocks the binding site of the ACE2 receptor, the receptor may be able to bind, but only weakly (in the case of partial inhibition), or in a different orientation to the natural binding interaction.

### Other Modes—Destabilising:

[1514] In some examples, the antibody may destabilise the SARS-CoV-2 spike protein. Such antibodies may therefore disrupt binding of the SARS-CoV-2 spike protein to the human ACE2 receptor as a result of destabilising the spike protein thereby resulting in a beneficial therapeutic effect, either when the antibody is used alone or in combination with a further anti-SARS-CoV-2 antibody.

### Other Modes—Increased Binding:

[1515] In some examples, the antibody may increase the number of RBDs in the UP position with an apparent increase in the binding between the SARS-CoV-2 spike protein and the human ACE2 receptor in biochemistry assays, but with an overall inhibition of appropriate spike protein function in the virus particle, leading to neutralisation of the virus. Such antibodies may be particularly useful therapeutically when used in combination with another RBD binding and ACE-2 blocking anti-SARS-CoV-2 antibody. For example, they may destabilise the interactions within the SARS-CoV-2 spike protein trimer or may force the RBD of the SARS-CoV-2 spike protein into upward configuration more often which may make it more susceptible to a neutralising antibody that specifically binds the RBD of the SARS-CoV-2 spike protein. Data supporting this mode of action are presented in Example 3.

[1516] Such antibodies may also be particularly useful as diagnostic antibodies, especially if used in a double antigen binding assays where the antibody is used to capture the spike protein.

[1517] Exemplary antibodies described herein are set out in Tables 1a and 1b and described further below.

### Group a ‘Ace2-Competing’ RBD Binders:

[1518] In some aspects, the antibody specifically binds the RBD of the SARS-CoV-2 spike protein, wherein the antibody competes for binding to the SARS-CoV-2 spike protein with the human ACE2 receptor.

[1519] Provided herein are antibodies that neutralise SARS-CoV-2 and specifically bind to the receptor binding domain (RBD) of the S1 subunit of SARS-CoV-2 and compete with ACE2 for binding to SARS-CoV-2. In one example, the antibodies have a high affinity (such as a KD of 10-9 M or lower or even a KD of 5×10-10 M or lower) for the isolated RBD of the SARS-CoV-2 spike protein, particularly when measured using a surface plasmon resonance (SPR) assay (e.g. a Biacore SPR assay). In one example, the antibodies neutralise SARS-CoV-2 with high potency (such as with an IC50 of lnM or lower, an IC50 of 100 pM or lower, an IC50 of 50 pM or lower, an IC50 of 10 pM or lower, or even an IC50 of 5 pM or lower) particularly in vitro in pseudovirus assays. In one example, the antibodies neutralise SARS-CoV-2 with high potency (such as with an IC50 of lnM or lower, an IC50 of 100 pM or lower, an IC50 of 50 pM or lower, an IC50 of 30 pM) particularly in vitro in live virus assays. In one example, the antibodies (i) have a high affinity (such as a KD of 10-9 M or lower or even a KD of 5×10-10 M or lower) for the RBD of SARS-CoV-2 and (ii) neutralise SARS-CoV-2 with high potency (such as with an IC50 of lnM or lower, an IC50 of 100 pM or lower, an IC50 of 50 pM or lower, an IC50 of 10 pM or lower, or even an IC50 of 5 pM or lower).

[1520] In one example, the antibody is selected from the group consisting of IMPI-029, IMPI-056, IMPI-005, IMPI-012, IMPI-052, IMPI-002, IMPI-041, IMPI-036, IMPI-055, IMPI-054, IMPI-042, IMPI-021, IMPI-060, IMPI-006, IMPI-004, IMPI-047, IMPI-037, IMPI-017 and IMPI-059.

[1521] In one example, the antibody is selected from the group consisting of IMPI-029, IMPI-056 and IMPI-005 (cluster 5 in FIG. 3). In one example, the antibody is selected from the group consisting of IMPI-012, IMPI-052 and IMPI-002 (cluster 6 in FIG. 3). In one example, the antibody is selected from the group consisting of IMPI-041, IMPI-036 and IMPI-055 (cluster 7 in FIG. 3). In one example, the antibody is selected from the group consisting of IMPI-054 and IMPI-042 (cluster 9 in FIG. 3). In one example, the antibody is selected from the group consisting of IMPI-021 and IMPI-060 (cluster 10 in FIG. 3).

[1522] In one example, the antibody is IMPI-029, IMPI-056 or IMPI-005. In one example, the antibody is IMPI-012, IMPI-052 or IMPI-002. In one example, the antibody is IMPI-041, IMPI-036 or IMPI-055. In one example, the antibody is IMPI-054 or IMPI-042. In one example, the antibody is IMPI-021 or IMPI-060.

[1523] In one example, the antibody is selected from the group consisting of YANG-1101, YANG-1103, YANG-1105, YANG-1106, YANG-1107, YANG-1108, YANG-1109, YANG-1110, YANG-1112, YANG-1112a, YANG-1112b, YANG-1112c, YANG-1113, YANG-1114, YANG-1115, YANG-1116, YANG-1117, YANG-1118, YANG-1119, YANG-2101, YANG-2102, YANG-2103, YANG-2104, YANG-2105, YANG-2106, YANG-2107, YANG-2108, YANG-2108a, YANG-2108b, YANG-2108c, YANG-2108d, YANG-2108e, YANG-2108f, YANG-2108g, YANG-2108h, YANG-2108i, YANG-2108j, YANG-2108k, YANG-21081, YANG-2109, YANG-2110, or YANG-2111.

[1524] In one example, the antibody is selected from the group consisting of YANG-1112, YANG-2107, YANG-2108, or YANG-2111.

[1525] In one example, the antibody is an antibody in the YANG-1112 antibody cluster, e.g. as shown in FIGS. 25 and 26: YANG-1112a, YANG-1112b, YANG-1112c.

[1526] In one example, the antibody is an antibody in the YANG 2107 and 2108 antibody cluster, e.g. as shown in FIGS. 17 and 18: YANG-2108a, YANG-2108b, YANG-2108c, YANG-2108d, YANG-2108e, YANG-2108f, YANG-2108g, YANG-2108h, YANG-2108i, YANG-2108j, YANG-2108k, YANG-21081.

[1527] In one example, the antibody is an antibody in the YANG-2111 antibody cluster, e.g. as shown in FIGS. 19 and 20: YANG-2111a, YANG-2111b.

### Group B ‘Trimer’ Binders:

[1528] In some aspects, the antibody specifically binds the trimer form of the SARS-CoV-2 spike protein.

[1529] Such antibodies preferentially bind to the trimer form of the SARS-CoV-2 spike protein over each of the isolated RBD, isolated S1 subunit and isolated S2 subunit of the SARS-CoV-2 spike protein. Such antibodies may show at least 50 fold, at least 100 fold, at least 150 fold, or at least 200 fold higher affinity for the trimer form of the SARS-CoV-2 spike protein over each of the isolated RBD, isolated S1 subunit and isolated S2 subunit of the SARS-CoV-2 spike protein, particularly in HTRF binding assays (e.g. as set out in Example 2). Such antibodies may show at least 50 fold, at least 100 fold, at least 150 fold, or at least 200 fold higher affinity for the trimer form of the SARS-CoV-2 spike protein over each of the isolated RBD, isolated S1 subunit and isolated S2 subunit of the SARS-CoV-2 spike protein, particularly in SPR binding assays (e.g. as defined herein). Such antibodies may prevent a function of ACE2 binding to SARS-CoV-2. Such antibodies generally do not compete with ACE2 for binding to SARS-CoV-2. Such antibodies may not bind to the isolated RBD of SARS-CoV-2. Such antibodies may not bind to the isolated RBD, the isolated S1 subunit or the isolated S2 subunit of SARS-CoV-2.

[1530] Preferably, the antibody is selected from the group consisting of IMPI-030, IMPI-053, IMPI-025, IMPI-040, IMPI-007, IMPI-020, IMPI-032, IMPI-023, IMPI-039, IMPI-001, IMPI-019, IMPI-010, IMPI-008, IMPI-031, IMPI-057, IMPI-022, IMPI-035, IMPI-067 and IMPI-072. In one example, the antibody is selected from the group consisting of IMPI-030, IMPI-053, IMPI-025, IMPI-040, IMPI-007, IMPI-020, IMPI-032, IMPI-023, IMPI-039, IMPI-001 and IMPI-019 (cluster 2 in FIG. 3). In one example, the antibody is selected from the group consisting of IMPI-010, IMPI-008, IMPI-031, IMPI-057, IMPI-022 and IMPI-035 (cluster 4 in FIG. 3). In one example, the antibody is selected from the group consisting of IMPI-067 and IMPI-072 (cluster 12 in FIG. 3). In one example, the antibody is IMPI-030, IMPI-053, IMPI-025, IMPI-040, IMPI-007, IMPI-020, IMPI-032, IMPI-023, IMPI-039, IMPI-001 or IMPI-019. In one example, the antibody is IMPI-010, IMPI-008, IMPI-031, IMPI-057, IMPI-022 or IMPI-035.

[1531] In one example, the antibody is IMPI-067 or IMPI-072.

### Group C ‘S2’ Binders:

[1532] In some aspects, the antibody specifically binds to the S2 subunit of the SARS-CoV spike protein.

[1533] Provided herein are antibodies neutralise SARS-CoV-2 and specifically bind to the S2 subunit of SARS-CoV-2. Such antibodies generally do not compete with ACE2 for binding to SARS-CoV-2. Such antibodies may show high affinity for the S2 subunit e.g. KD of 10-9 M or lower. Such antibodies may be valuable as medicaments as described herein, such as in combination therapies, especially for example where they also show ADCC activity.

[1534] In one example, the antibody is selected from the group consisting of IMPI-003, IMPI-013, IMPI-063, IMPI-061, IMPI-062, IMPI-064, IMPI-065, IMPI-066, IMPI-069, IMPI-070 and IMPI-071. In one example, the antibody is selected from the group consisting of IMPI-003 and IMPI-013 (cluster 8 in FIG. 3). More preferably, the antibody is selected from the group consisting of IMPI-063, IMPI-061, IMPI-062, IMPI-064, IMPI-065, IMPI-066, IMPI-069, IMPI-070 and IMPI-071 (cluster 11 in example 3). In one example, the antibody is IMPI-003 or IMPI-013. More preferably, the antibody is IMPI-063, IMPI-061, IMPI-062, IMPI-064, IMPI-065, IMPI-066, IMPI-069, IMPI-070 or IMPI-071.

[1535] In one example, the antibody is selected from the group consisting of YANG-1201, YANG-1202, YANG-1203, YANG-1204, YANG-1205, YANG-1206, YANG-1207, YANG-2201, YANG-2202, YANG-2203, YANG-2203a, YANG-2203b, YANG-2203c, YANG-2203d, YANG-2203e, YANG-2203f, YANG-2203g, YANG-2203h, YANG-2203i, YANG-2203j, YANG-2203k, YANG-2204, YANG-2205, YANG-2206, YANG-2207, and YANG-2208.

[1536] In one example, the antibody is selected from the group consisting of YANG-2203, YANG-2204, YANG-2205, YANG-2206, YANG-2207, and YANG-2208.

[1537] In one example, the antibody is an antibody in the YANG-2203 antibody cluster, e.g. as shown in FIGS. 21 and 22: YANG-2203a, YANG-2203b, YANG-2203c, YANG-2203d, YANG-2203e, YANG-2203f, YANG-2203g, YANG-2203h, YANG-2203i, YANG-2203j, YANG-2203k.

[1538] In one example, the antibody is an antibody in the YANG-2204, YANG-2205, YANG-2206, YANG-2207, and YANG-2208 antibody cluster, e.g. as shown in FIGS. 23 and 24: YANG-2209, YANG-2210, YANG-2211, YANG-2212, YANG-2213, YANG-2214, YANG-2215, YANG-2216, YANG-2217, YANG-2218, YANG-2219, YANG-2220, YANG-2221, YANG-2222, YANG-2223, YANG-2224, YANG-2225, YANG-2226, YANG-2227, YANG-2228, YANG-2229, YANG-2230, YANG-2231, YANG-2232, YANG-2233, YANG-2234, YANG-2235, YANG-2236, YANG-2237, YANG-2238, YANG-2239, YANG-2240, YANG-2241, YANG-2242, YANG-2243, YANG-2244, YANG-2245, YANG-2246, YANG-2247, YANG-2248, YANG-2249, YANG-2250, YANG-2251, YANG-2252, YANG-2253, YANG-2254, YANG-2255, YANG-2256, YANG-2257, YANG-2258, YANG-2259, YANG-2260, YANG-2261, YANG-2262, YANG-2263, YANG-2264, YANG-2265, YANG-2266, YANG-2267, YANG-2268, YANG-2269, YANG-2270, YANG-2271, YANG-2272, YANG-2273, YANG-2274, YANG-2275, YANG-2276, YANG-2277, YANG-2278, YANG-2279, YANG-2280, YANG-2281, YANG-2282, YANG-2283, YANG-2284, YANG-2285, YANG-2286, YANG-2287, YANG-2288, YANG-2289, YANG-2290, YANG-2291, YANG-2292, YANG-2293, YANG-2294, YANG-2295, YANG-2296, YANG-2297, YANG-2298, YANG-2299, YANG-2299a, YANG-2299b, YANG-2299c, YANG-2299d, YANG-2299e, YANG-2299f, YANG-2299g, YANG-2299h, YANG-2299i, YANG-2299j, YANG-2299k, YANG-22991

### Group D ‘Non-Compete’ RBD Binders:

[1539] In some aspects, the antibody specifically binds the RBD of the SARS-CoV-2 spike protein, wherein the antibody does not compete for binding to the SARS-CoV-2 spike protein with the human ACE2 receptor. Provided herein are antibodies that specifically bind to the receptor binding domain (RBD) of the S 1 subunit of SARS-CoV-2 and do not compete with ACE2 for binding to SARS-CoV-2. Such antibodies may show 0-2 fold change in neutralising activity relative to SAD S35 antibody. Such antibodies may optionally show neutralising activity. For example, the antibody may neutralise SARS-CoV-2 with an IC50 of 55 nM or lower, an IC50 of 35 nM or lower, an IC50 of 15 nM or lower, an IC50 of 10 nM or lower, or an IC50 of 3 nM or lower (e.g. as measured in a pseudovirus neutralisation assay). In other examples, the antibody may neutralise SARS-CoV-2 with an IC50 of 2 nM or greater, an IC50 of 5 nM or greater, an IC50 of 10 nM or greater, an IC50 of 30 nM or greater, or even an IC50 of 50 nM or greater (e.g. as measured in a pseudovirus neutralisation assay) and yet are still of interest as therapeutic antibodies. Such antibodies may show high affinity for the RBD e.g. KD of 10-9 M or lower. Such antibodies may result in increased binding between the RBD and the ACE2 receptor. Such antibodies may also result in destabilising of the trimer form of the SARS-CoV-2 spike protein and/or may cross-react with SARS-CoV.

[1540] In one example, the antibody is selected from the group consisting of IMPI-026, IMPI-034, IMPI-016, IMPI-050, IMPI-049, IMPI-015, IMPI-009, IMPI-011, IMPI-044, IMPI-046, IMPI-051, IMPI-024, IMPI-058, IMPI-043, IMPI-045, IMPI-027, IMPI-018, IMPI-048, IMPI-033, IMPI-014, IMPI-038 and IMPI-068. In one example, the antibody is selected from the group consisting of IMPI-026, IMPI-034, IMPI-016, IMPI-050, IMPI-049, IMPI-015, IMPI-009, IMPI-011, IMPI-044, IMPI-046, IMPI-051, IMPI-024, IMPI-058 and IMPI-043 (cluster 1 in FIG. 3). In one example, the antibody is selected from the group consisting of IMPI-045, IMPI-027, IMPI-018, IMPI-048, IMPI-033 and IMPI-014 (cluster 3 in FIG. 3). In one example, the antibody is IMPI-026, IMPI-034, IMPI-016, IMPI-050, IMPI-049, IMPI-015, IMPI-009, IMPI-011, IMPI-044, IMPI-046, IMPI-051, IMPI-024, IMPI-058 or IMPI-043. In another example, the antibody is IMPI-045, IMPI-027, IMPI-018, IMPI-048, IMPI-033 or IMPI-014.

[1541] In one example, the antibody is selected from the group consisting of YANG-1111, YANG-1102, YANG-1401, YANG-1401a, YANG-1401b, YANG-1401c, YANG-1401d, YANG-1401e, YANG-1402, YANG-1403 or YANG-2112.

[1542] In one example, the antibody is an antibody in the YANG-1401 antibody cluster, e.g. as shown in FIGS. 15 and 16: YANG-1401a, YANG-1401b, YANG-1401c, YANG-1401d, YANG-1401e.

### Group E ‘NTD’ Binders:

[1543] In some aspects, the antibody specifically binds the NTD of the S1 sub-unit of the SARS-CoV-2 spike protein.

[1544] In one example, the antibody is selected from the group consisting of YANG-1301, YANG-1302, YANG-1303, YANG-1304, YANG-1305; YANG-2301, YANG-2302, YANG-2303, YANG-2304, YANG-2305, or YANG-2306.

### Groups A-D:

[1545] In one example the antibody is IMPI-001. In one example the antibody is IMPI-002. In one example the antibody is IMPI-003. In one example the antibody is IMPI-004. In one example the antibody is IMPI-005.

[1546] In one example the antibody is IMPI-006. In one example the antibody is IMPI-007. In one example the antibody is IMPI-008. In one example the antibody is IMPI-009. In one example the antibody is IMPI-010.

[1547] In one example the antibody is IMPI-011. In one example the antibody is IMPI-012. In one example the antibody is IMPI-013. In one example the antibody is IMPI-014. In one example the antibody is IMPI-015.

[1548] In one example the antibody is IMPI-016. In one example the antibody is IMPI-017. In one example the antibody is IMPI-018. In one example the antibody is IMPI-019. In one example the antibody is IMPI-020.

[1549] In one example the antibody is IMPI-021. In one example the antibody is IMPI-022. In one example the antibody is IMPI-023. In one example the antibody is IMPI-024. In one example the antibody is IMPI-025.

[1550] In one example the antibody is IMPI-026. In one example the antibody is IMPI-027. In one example the antibody is IMPI-028. In one example the antibody is IMPI-029. In one example the antibody is IMPI-030.

[1551] In one example the antibody is IMPI-031. In one example the antibody is IMPI-032. In one example the antibody is IMPI-033. In one example the antibody is IMPI-034. In one example the antibody is IMPI-035.

[1552] In one example the antibody is IMPI-036. In one example the antibody is IMPI-037. In one example the antibody is IMPI-038. In one example the antibody is IMPI-039. In one example the antibody is IMPI-040.

[1553] In one example the antibody is IMPI-041. In one example the antibody is IMPI-042. In one example the antibody is IMPI-043. In one example the antibody is IMPI-044. In one example the antibody is IMPI-045.

[1554] In one example the antibody is IMPI-046. In one example the antibody is IMPI-047. In one example the antibody is IMPI-048. In one example the antibody is IMPI-049. In one example the antibody is IMPI-050.

[1555] In one example the antibody is IMPI-051. In one example the antibody is IMPI-052. In one example the antibody is IMPI-053. In one example the antibody is IMPI-054. In one example the antibody is IMPI-055.

[1556] In one example the antibody is IMPI-056. In one example the antibody is IMPI-057. In one example the antibody is IMPI-058. In one example the antibody is IMPI-059. In one example the antibody is IMPI-060.

[1557] In one example the antibody is IMPI-061. In one example the antibody is IMPI-062. In one example the antibody is IMPI-063. In one example the antibody is IMPI-064. In one example the antibody is IMPI-065. In one example the antibody is IMPI-066. In one example the antibody is IMPI-067. In one example the antibody is IMPI-068. In one example the antibody is IMPI-069. In one example the antibody is IMPI-070. In one example the antibody is IMPI-071. In one example the antibody is IMPI-072.

[1558] In one example the antibody is YANG-1101.

[1559] In one example the antibody is YANG-1103.

[1560] In one example the antibody is YANG-1105.

[1561] In one example the antibody is YANG-1106.

[1562] In one example the antibody is YANG-1107.

[1563] In one example the antibody is YANG-1108.

[1564] In one example the antibody is YANG-1109.

[1565] In one example the antibody is YANG-1110.

[1566] In one example the antibody is YANG-1112.

[1567] In one example the antibody is YANG-1113.

[1568] In one example the antibody is YANG-1114.

[1569] In one example the antibody is YANG-1115.

[1570] In one example the antibody is YANG-1116.

[1571] In one example the antibody is YANG-1117.

[1572] In one example the antibody is YANG-1118.

[1573] In one example the antibody is YANG-1119.

[1574] In one example the antibody is YANG-2101.

[1575] In one example the antibody is YANG-2102.

[1576] In one example the antibody is YANG-2103.

[1577] In one example the antibody is YANG-2104.

[1578] In one example the antibody is YANG-2105.

[1579] In one example the antibody is YANG-2106.

[1580] In one example the antibody is YANG-2107.

[1581] In one example the antibody is YANG-2108.

[1582] In one example the antibody is YANG-2109.

[1583] In one example the antibody is YANG-2110.

[1584] In one example the antibody is YANG-2111.

[1585] In one example the antibody is YANG-1201.

[1586] In one example the antibody is YANG-1202.

[1587] In one example the antibody is YANG-1203.

[1588] In one example the antibody is YANG-1204.

[1589] In one example the antibody is YANG-1205.

[1590] In one example the antibody is YANG-1206.

[1591] In one example the antibody is YANG-1207.

[1592] In one example the antibody is YANG-2201.

[1593] In one example the antibody is YANG-2202.

[1594] In one example the antibody is YANG-2203.

[1595] In one example the antibody is YANG-2204.

[1596] In one example the antibody is YANG-2205.

[1597] In one example the antibody is YANG-2206.

[1598] In one example the antibody is YANG-2207.

[1599] In one example the antibody is YANG-2208.

[1600] In one example the antibody is YANG-1102.

[1601] In one example the antibody is YANG-1111.

[1602] In one example the antibody is YANG-1401.

[1603] In one example the antibody is YANG-1402.

[1604] In one example the antibody is YANG-1403.

[1605] In one example the antibody is YANG-2112.

[1606] In one embodiment, the antibody is YANG-1301.

[1607] In one embodiment, the antibody is YANG-1302.

[1608] In one embodiment, the antibody is YANG-1303.

[1609] In one embodiment, the antibody is YANG-1304.

[1610] In one embodiment, the antibody is YANG-1305.

[1611] In one embodiment, the antibody is YANG-2301.

[1612] In one embodiment, the antibody is YANG-2302.

[1613] In one embodiment, the antibody is YANG-2303.

[1614] In one embodiment, the antibody is YANG-2304.

[1615] In one embodiment, the antibody is YANG-2305.

[1616] In one embodiment, the antibody is YANG-2306.

[1617] Antibody IMPI-052 has a heavy chain variable region (VH) amino acid sequence of SEQ ID No:2, comprising the CDRH1 amino acid sequence of SEQ ID No: 3 (IMGT), the CDRH2 amino acid sequence of SEQ ID No: 4 (IMGT), and the CDRH3 amino acid sequence of SEQ ID No: 5 (IMGT). The heavy chain nucleic acid sequence of the VH domain is SEQ ID No: 1. Antibody IMPI-052 has a light chain variable region (VL) amino acid sequence of SEQ ID No: 7, comprising the CDRL1 amino acid sequence of SEQ ID No: 8 (IMGT), the CDRL2 amino acid sequence of SEQ ID No:9 (IMGT), and the CDRL3 amino acid sequence of SEQ ID No: 10 (IMGT). The light chain nucleic acid sequence of the VL domain is SEQ ID No: 6. The VH domain may be combined with any of the heavy chain constant region sequences described herein (the nucleotide and corresponding amino acid sequences of which are set out in Table 2). The VL domain may be combined with any of the light chain constant region sequences described herein (the nucleotide and corresponding amino acid sequences of which are set out in Table 2).

[1618] Antibody IMPI-047 has a heavy chain variable region (VH) amino acid sequence of SEQ ID No: 12, comprising the CDRH1 amino acid sequence of SEQ ID No: 13 (IMGT), the CDRH2 amino acid sequence of SEQ ID No: 14 (IMGT), and the CDRH3 amino acid sequence of SEQ ID No: 15 (IMGT). The heavy chain nucleic acid sequence of the VH domain is SEQ ID No: 11. Antibody IMPI-047 has a light chain variable region (VL) amino acid sequence of SEQ ID No: 17, comprising the CDRL1 amino acid sequence of SEQ ID No: 8 (IMGT), the CDRL2 amino acid sequence of SEQ ID No: 18 (IMGT), and the CDRL3 amino acid sequence of SEQ ID No: 19 (IMGT). The light chain nucleic acid sequence of the VL domain is SEQ ID No: 16. The VH domain may be combined with any ofthe heavy chain constant region sequences described herein (the nucleotide and corresponding amino acid sequences of which are set out in Table 2). The VL domain may be combined with any of the light chain constant region sequences described herein (the nucleotide and corresponding amino acid sequences of which are set out in Table 2).

[1619] Antibody IMPI-003 has a heavy chain variable region (VH) amino acid sequence of SEQ ID No: 21, comprising the CDRH1 amino acid sequence of SEQ ID No: 22 (IMGT), the CDRH2 amino acid sequence of SEQ ID No: 23 (IMGT), and the CDRH3 amino acid sequence of SEQ ID No: 24 (IMGT). The heavy chain nucleic acid sequence of the VH domain is SEQ ID No: 20. Antibody IMPI-003 has a light chain variable region (VL) amino acid sequence of SEQ ID No: 26, comprising the CDRL1 amino acid sequence of SEQ ID No: 27 (IMGT), the CDRL2 amino acid sequence of SEQ ID No: 28 (IMGT), and the CDRL3 amino acid sequence of SEQ ID No: 29 (IMGT). The light chain nucleic acid sequence of the VL domain is SEQ ID No: 25. The VH domain may be combined with any ofthe heavy chain constant region sequences described herein (the nucleotide and corresponding amino acid sequences of which are set out in Table 2). The VL domain may be combined with any of the light chain constant region sequences described herein (the nucleotide and corresponding amino acid sequences of which are set out in Table 2).

[1620] Antibody IMPI-043 has a heavy chain variable region (VH) amino acid sequence of SEQ ID No: 31, comprising the CDRH1 amino acid sequence of SEQ ID No: 32 (IMGT), the CDRH2 amino acid sequence of SEQ ID No: 33 (IMGT), and the CDRH3 amino acid sequence of SEQ ID No: 34 (IMGT). The heavy chain nucleic acid sequence of the VH domain is SEQ ID No: 30. Antibody IMPI-043 has a light chain variable region (VL) amino acid sequence of SEQ ID No: 36, comprising the CDRL1 amino acid sequence of SEQ ID No: 37 (IMGT), the CDRL2 amino acid sequence of SEQ ID No: 28 (IMGT), and the CDRL3 amino acid sequence of SEQ ID No: 38 (IMGT). The light chain nucleic acid sequence of the VL domain is SEQ ID No: 35. The VH domain may be combined with any ofthe heavy chain constant region sequences described herein (the nucleotide and corresponding amino acid sequences of which are set out in Table 2). The VL domain may be combined with any of the light chain constant region sequences described herein (the nucleotide and corresponding amino acid sequences of which are set out in Table 2).

[1621] Antibody IMPI-048 has a heavy chain variable region (VH) amino acid sequence of SEQ ID No: 40, comprising the CDRH1 amino acid sequence of SEQ ID No: 41 (IMGT), the CDRH2 amino acid sequence of SEQ ID No: 42 (IMGT), and the CDRH3 amino acid sequence of SEQ ID No: 43 (IMGT). The heavy chain nucleic acid sequence of the VH domain is SEQ ID No: 39. Antibody IMPI-048 has a light chain variable region (VL) amino acid sequence of SEQ ID No: 45, comprising the CDRL1 amino acid sequence of SEQ ID No: 46 (IMGT), the CDRL2 amino acid sequence of SEQ ID No: 28 (IMGT), and the CDRL3 amino acid sequence of SEQ ID No: 47 (IMGT). The light chain nucleic acid sequence of the VL domain is SEQ ID No: 44. The VH domain may be combined with any ofthe heavy chain constant region sequences described herein (the nucleotide and corresponding amino acid sequences of which are set out in Table 2). The VL domain may be combined with any of the light chain constant region sequences described herein (the nucleotide and corresponding amino acid sequences of which are set out in Table 2).

[1622] Antibody IMPI-014 has a heavy chain variable region (VH) amino acid sequence of SEQ ID No: 49, comprising the CDRH1 amino acid sequence of SEQ ID No: 41 (IMGT), the CDRH2 amino acid sequence of SEQ ID No: 42 (IMGT), and the CDRH3 amino acid sequence of SEQ ID No: 43 (IMGT). The heavy chain nucleic acid sequence of the VH domain is SEQ ID No: 48. Antibody IMPI-014 has a light chain variable region (VL) amino acid sequence of SEQ ID No: 51, comprising the CDRL1 amino acid sequence of SEQ ID No: 37 (IMGT), the CDRL2 amino acid sequence of SEQ ID No: 28 (IMGT), and the CDRL3 amino acid sequence of SEQ ID No: 47 (IMGT). The light chain nucleic acid sequence of the VL domain is SEQ ID No: 50. The VH domain may be combined with any ofthe heavy chain constant region sequences described herein (the nucleotide and corresponding amino acid sequences of which are set out in Table 2). The VL domain may be combined with any of the light chain constant region sequences described herein (the nucleotide and corresponding amino acid sequences of which are set out in Table 2).

[1623] Antibody IMPI-059 has a heavy chain variable region (VH) amino acid sequence of SEQ ID No: 53, comprising the CDRH1 amino acid sequence of SEQ ID No: 54 (IMGT), the CDRH2 amino acid sequence of SEQ ID No: 55 (IMGT), and the CDRH3 amino acid sequence of SEQ ID No: 56 (IMGT). The heavy chain nucleic acid sequence of the VH domain is SEQ ID No: 52. Antibody IMPI-059 has a light chain variable region (VL) amino acid sequence of SEQ ID No: 58, comprising the CDRL1 amino acid sequence of SEQ ID No: 59 (IMGT), the CDRL2 amino acid sequence of SEQ ID No: 28 (IMGT), and the CDRL3 amino acid sequence of SEQ ID No: 60 (IMGT). The light chain nucleic acid sequence of the VL domain is SEQ ID No: 57. The VH domain may be combined with any ofthe heavy chain constant region sequences described herein (the nucleotide and corresponding amino acid sequences of which are set out in Table 2). The VL domain may be combined with any of the light chain constant region sequences described herein (the nucleotide and corresponding amino acid sequences of which are set out in Table 2).

[1624] Antibody IMPI-057 has a heavy chain variable region (VH) amino acid sequence of SEQ ID No: 62, comprising the CDRH1 amino acid sequence of SEQ ID No: 22 (IMGT), the CDRH2 amino acid sequence of SEQ ID No: 63 (IMGT), and the CDRH3 amino acid sequence of SEQ ID No: 64 (IMGT). The heavy chain nucleic acid sequence of the VH domain is SEQ ID No: 61. Antibody IMPI-057 has a light chain variable region (VL) amino acid sequence of SEQ ID No: 66, comprising the CDRL1 amino acid sequence of SEQ ID No: 67 (IMGT), the CDRL2 amino acid sequence of SEQ ID No: 68 (IMGT), and the CDRL3 amino acid sequence of SEQ ID No: 69 (IMGT). The light chain nucleic acid sequence of the VL domain is SEQ ID No: 65. The VH domain may be combined with any ofthe heavy chain constant region sequences described herein (the nucleotide and corresponding amino acid sequences of which are set out in Table 2). The VL domain may be combined with any of the light chain constant region sequences described herein (the nucleotide and corresponding amino acid sequences of which are set out in Table 2).

[1625] Antibody IMPI-015 has a heavy chain variable region (VH) amino acid sequence of SEQ ID No: 71, comprising the CDRH1 amino acid sequence of SEQ ID No: 72 (IMGT), the CDRH2 amino acid sequence of SEQ ID No: 33 (IMGT), and the CDRH3 amino acid sequence of SEQ ID No: 34 (IMGT). The heavy chain nucleic acid sequence of the VH domain is SEQ ID No: 70. Antibody IMPI-015 has a light chain variable region (VL) amino acid sequence of SEQ ID No: 74, comprising the CDRL1 amino acid sequence of SEQ ID No: 75 (IMGT), the CDRL2 amino acid sequence of SEQ ID No: 28 (IMGT), and the CDRL3 amino acid sequence of SEQ ID No: 76 (IMGT). The light chain nucleic acid sequence of the VL domain is SEQ ID No: 73. The VH domain may be combined with any ofthe heavy chain constant region sequences described herein (the nucleotide and corresponding amino acid sequences of which are set out in Table 2). The VL domain may be combined with any of the light chain constant region sequences described herein (the nucleotide and corresponding amino acid sequences of which are set out in Table 2).

[1626] Antibody IMPI-025 has a heavy chain variable region (VH) amino acid sequence of SEQ ID No: 78, comprising the CDRH1 amino acid sequence of SEQ ID No: 79 (IMGT), the CDRH2 amino acid sequence of SEQ ID No: 80 (IMGT), and the CDRH3 amino acid sequence of SEQ ID No: 81 (IMGT). The heavy chain nucleic acid sequence of the VH domain is SEQ ID No: 77. Antibody IMPI-025 has a light chain variable region (VL) amino acid sequence of SEQ ID No: 83, comprising the CDRL1 amino acid sequence of SEQ ID No: 84 (IMGT), the CDRL2 amino acid sequence of SEQ ID No: 85 (IMGT), and the CDRL3 amino acid sequence of SEQ ID No: 86 (IMGT). The light chain nucleic acid sequence of the VL domain is SEQ ID No: 82. The VH domain may be combined with any ofthe heavy chain constant region sequences described herein (the nucleotide and corresponding amino acid sequences of which are set out in Table 2). The VL domain may be combined with any of the light chain constant region sequences described herein (the nucleotide and corresponding amino acid sequences of which are set out in Table 2).

[1627] Antibody IMPI-051 has a heavy chain variable region (VH) amino acid sequence of SEQ ID No: 88, comprising the CDRH1 amino acid sequence of SEQ ID No: 89 (IMGT), the CDRH2 amino acid sequence of SEQ ID No: 33 (IMGT), and the CDRH3 amino acid sequence of SEQ ID No: 34 (IMGT). The heavy chain nucleic acid sequence of the VH domain is SEQ ID No: 87. Antibody IMPI-051 has a light chain variable region (VL) amino acid sequence of SEQ ID No: 91, comprising the CDRL1 amino acid sequence of SEQ ID No: 92 (IMGT), the CDRL2 amino acid sequence of SEQ ID No: 28 (IMGT), and the CDRL3 amino acid sequence of SEQ ID No: 93 (IMGT). The light chain nucleic acid sequence of the VL domain is SEQ ID No: 90. The VH domain may be combined with any ofthe heavy chain constant region sequences described herein (the nucleotide and corresponding amino acid sequences of which are set out in Table 2). The VL domain may be combined with any of the light chain constant region sequences described herein (the nucleotide and corresponding amino acid sequences of which are set out in Table 2).

[1628] Antibody IMPI-031 has a heavy chain variable region (VH) amino acid sequence of SEQ ID No: 95, comprising the CDRH1 amino acid sequence of SEQ ID No: 22 (IMGT), the CDRH2 amino acid sequence of SEQ ID No: 23 (IMGT), and the CDRH3 amino acid sequence of SEQ ID No: 96 (IMGT). The heavy chain nucleic acid sequence of the VH domain is SEQ ID No: 94. Antibody IMPI-031 has a light chain variable region (VL) amino acid sequence of SEQ ID No: 98, comprising the CDRL1 amino acid sequence of SEQ ID No: 37 (IMGT), the CDRL2 amino acid sequence of SEQ ID No: 28 (IMGT), and the CDRL3 amino acid sequence of SEQ ID No: 69 (IMGT). The light chain nucleic acid sequence of the VL domain is SEQ ID No:97. The VH domain may be combined with any of the heavy chain constant region sequences described herein (the nucleotide and corresponding amino acid sequences of which are set out in Table 2). The VL domain may be combined with any of the light chain constant region sequences described herein (the nucleotide and corresponding amino acid sequences of which are set out in Table 2). Antibody IMPI-045 has a heavy chain variable region (VH) amino acid sequence of SEQ ID No: 100, comprising the CDRH1 amino acid sequence of SEQ ID No: 101 (IMGT),the CDRH2 amino acid sequence of SEQ ID No: 42 (IMGT), and the CDRH3 amino acid sequence of SEQ ID No: 43 (IMGT). The heavy chain nucleic acid sequence of the VH domain is SEQ ID No: 99. Antibody IMPI-045 has a light chain variable region (VL) amino acid sequence of SEQ ID No: 103, comprising the CDRL1 amino acid sequence of SEQ ID No: 37 (IMGT), the CDRL2 amino acid sequence of SEQ ID No: 28 (IMGT), and the CDRL3 amino acid sequence of SEQ ID No: 47 (IMGT). The light chain nucleic acid sequence of the VL domain is SEQ ID No: 102. The VH domain may be combined with any of the heavy chain constant region sequences described herein (the nucleotide and corresponding amino acid sequences of which are set out in Table 2). The VL domain may be combined with any of the light chain constant region sequences described herein (the nucleotide and corresponding amino acid sequences of which are set out in Table 2).

[1629] Antibody IMPI-005 has a heavy chain variable region (VH) amino acid sequence of SEQ ID No: 105, comprising the CDRH1 amino acid sequence of SEQ ID No: 13 (IMGT), the CDRH2 amino acid sequence of SEQ ID No: 14 (IMGT), and the CDRH3 amino acid sequence of SEQ ID No: 106 (IMGT). The heavy chain nucleic acid sequence of the VH domain is SEQ ID No: 104. Antibody IMPI-005 has a light chain variable region (VL) amino acid sequence of SEQ ID No: 108, comprising the CDRL1 amino acid sequence of SEQ ID No: 8 (IMGT), the CDRL2 amino acid sequence of SEQ ID No: 18 (IMGT), and the CDRL3 amino acid sequence of SEQ ID No: 109 (IMGT). The light chain nucleic acid sequence of the VL domain is SEQ ID No: 107. The VH domain may be combined with any of the heavy chain constant region sequences described herein (the nucleotide and corresponding amino acid sequences of which are set out in Table 2). The VL domain may be combined with any of the light chain constant region sequences described herein (the nucleotide and corresponding amino acid sequences of which are set out in Table 2). Antibody IMPI-038 has a heavy chain variable region (VH) amino acid sequence of SEQ ID No: 111, comprising the CDRH1 amino acid sequence of SEQ ID No: 112 (IMGT), the CDRH2 amino acid sequence of SEQ ID No: 113 (IMGT), and the CDRH3 amino acid sequence of SEQ ID No: 114 (IMGT). The heavy chain nucleic acid sequence of the VH domain is SEQ ID No: 110. Antibody IMPI-038 has a light chain variable region (VL) amino acid sequence of SEQ ID No: 116, comprising the CDRL1 amino acid sequence of SEQ ID No: 117 (IMGT), the CDRL2 amino acid sequence of SEQ ID No: 28 (IMGT), and the CDRL3 amino acid sequence of SEQ ID No: 118 (IMGT). The light chain nucleic acid sequence of the VL domain is SEQ ID No: 115. The VH domain may be combined with any of the heavy chain constant region sequences described herein (the nucleotide and corresponding amino acid sequences of which are set out in Table 2). The VL domain may be combined with any of the light chain constant region sequences described herein (the nucleotide and corresponding amino acid sequences of which are set out in Table 2). Antibody IMPI-036 has a heavy chain variable region (VH) amino acid sequence of SEQ ID No: 120, comprising the CDRH1 amino acid sequence of SEQ ID No: 121 (IMGT), the CDRH2 amino acid sequence of SEQ ID No: 122 (IMGT), and the CDRH3 amino acid sequence of SEQ ID No: 123 (IMGT). The heavy chain nucleic acid sequence of the VH domain is SEQ ID No: 119. Antibody IMPI-036 has a light chain variable region (VL) amino acid sequence of SEQ ID No: 125, comprising the CDRL1 amino acid sequence of SEQ ID No: 126 (IMGT), the CDRL2 amino acid sequence of SEQ ID No: 127 (IMGT), and the CDRL3 amino acid sequence of SEQ ID No: 128 (IMGT). The light chain nucleic acid sequence of the VL domain is SEQ ID No: 124. The VH domain may be combined with any of the heavy chain constant region sequences described herein (the nucleotide and corresponding amino acid sequences of which are set out in Table 2). The VL domain may be combined with any of the light chain constant region sequences described herein (the nucleotide and corresponding amino acid sequences of which are set out in Table 2).

[1630] Antibody IMPI-023 has a heavy chain variable region (VH) amino acid sequence of SEQ ID No: 130, comprising the CDRH1 amino acid sequence of SEQ ID No: 131 (IMGT), the CDRH2 amino acid sequence of SEQ ID No: 132 (IMGT), and the CDRH3 amino acid sequence of SEQ ID No: 133 (IMGT). The heavy chain nucleic acid sequence of the VH domain is SEQ ID No: 129. Antibody IMPI-023 has a light chain variable region (VL) amino acid sequence of SEQ ID No: 135, comprising the CDRL1 amino acid sequence of SEQ ID No 136 (IMGT), the CDRL2 amino acid sequence of SEQ ID No: 85 (IMGT), and the CDRL3 amino acid sequence of SEQ ID No: 86 (IMGT). The light chain nucleic acid sequence of the VL domain is SEQ ID No: 134. The VH domain may be combined with any of the heavy chain constant region sequences described herein (the nucleotide and corresponding amino acid sequences of which are set out in Table 2). The VL domain may be combined with any of the light chain constant region sequences described herein (the nucleotide and corresponding amino acid sequences of which are set out in Table 2).

[1631] Antibody IMPI-019 has a heavy chain variable region (VH) amino acid sequence of SEQ ID No: 138, comprising the CDRH1 amino acid sequence of SEQ ID No: 139 (IMGT), the CDRH2 amino acid sequence of SEQ ID No: 140 (IMGT), and the CDRH3 amino acid sequence of SEQ ID No: 141 (IMGT). The heavy chain nucleic acid sequence of the VH domain is SEQ ID No: 137. Antibody IMPI-019 has a light chain variable region (VL) amino acid sequence of SEQ ID No: 143, comprising the CDRL1 amino acid sequence of SEQ ID No: 144 (IMGT), the CDRL2 amino acid sequence of SEQ ID No: 85 (IMGT), and the CDRL3 amino acid sequence of SEQ ID No: 86 (IMGT). The light chain nucleic acid sequence of the VL domain is SEQ ID No: 142. The VH domain may be combined with any of the heavy chain constant region sequences described herein (the nucleotide and corresponding amino acid sequences of which are set out in Table 2). The VL domain may be combined with any of the light chain constant region sequences described herein (the nucleotide and corresponding amino acid sequences of which are set out in Table 2).

[1632] Antibody IMPI-008 has a heavy chain variable region (VH) amino acid sequence of SEQ ID No: 146, comprising the CDRH1 amino acid sequence of SEQ ID No: 22 (IMGT), the CDRH2 amino acid sequence of SEQ ID No: 23 (IMGT), and the CDRH3 amino acid sequence of SEQ ID No: 147 (IMGT). The heavy chain nucleic acid sequence of the VH domain is SEQ ID No: 145. Antibody IMPI-008 has a light chain variable region (VL) amino acid sequence of SEQ ID No: 149, comprising the CDRL1 amino acid sequence of SEQ ID No: 37 (IMGT), the CDRL2 amino acid sequence of SEQ ID No: 28 (IMGT), and the CDRL3 amino acid sequence of SEQ ID No: 69 (IMGT). The light chain nucleic acid sequence of the VL domain is SEQ ID No: 148. The VH domain may be combined with any of the heavy chain constant region sequences described herein (the nucleotide and corresponding amino acid sequences of which are set out in Table 2). The VL domain may be combined with any of the light chain constant region sequences described herein (the nucleotide and corresponding amino acid sequences of which are set out in Table 2).

[1633] Antibody IMPI-004 has a heavy chain variable region (VH) amino acid sequence of SEQ ID No: 151, comprising the CDRH1 amino acid sequence of SEQ ID No: 112 (IMGT), the CDRH2 amino acid sequence of SEQ ID No: 152 (IMGT), and the CDRH3 amino acid sequence of SEQ ID No: 153 (IMGT). The heavy chain nucleic acid sequence of the VH domain is SEQ ID No: 150. Antibody IMPI-004 has a light chain variable region (VL) amino acid sequence of SEQ ID No: 155, comprising the CDRL1 amino acid sequence of SEQ ID No: 156 (IMGT), the CDRL2 amino acid sequence of SEQ ID No: 157 (IMGT), and the CDRL3 amino acid sequence of SEQ ID No: 158 (IMGT). The light chain nucleic acid sequence of the VL domain is SEQ ID No: 154. The VH domain may be combined with any of the heavy chain constant region sequences described herein (the nucleotide and corresponding amino acid sequences of which are set out in Table 2). The VL domain may be combined with any of the light chain constant region sequences described herein (the nucleotide and corresponding amino acid sequences of which are set out in Table 2).

[1634] Antibody IMPI-012 has a heavy chain variable region (VH) amino acid sequence of SEQ ID No: 160, comprising the CDRH1 amino acid sequence of SEQ ID No: 161 (IMGT), the CDRH2 amino acid sequence of SEQ ID No: 4 (IMGT), and the CDRH3 amino acid sequence of SEQ ID No: 5 (IMGT). The heavy chain nucleic acid sequence of the VH domain is SEQ ID No: 159. Antibody IMPI-012 has a light chain variable region (VL) amino acid sequence of SEQ ID No: 163, comprising the CDRL1 amino acid sequence of SEQ ID No: 8 (IMGT), the CDRL2 amino acid sequence of SEQ ID No: 18 (IMGT), and the CDRL3 amino acid sequence of SEQ ID No: 164 (IMGT). The light chain nucleic acid sequence of the VL domain is SEQ ID No: 162. The VH domain may be combined with any of the heavy chain constant region sequences described herein (the nucleotide and corresponding amino acid sequences of which are set out in Table 2). The VL domain may be combined with any of the light chain constant region sequences described herein (the nucleotide and corresponding amino acid sequences of which are set out in Table 2).

[1635] Antibody IMPI-010 has a heavy chain variable region (VH) amino acid sequence of SEQ ID No: 166, comprising the CDRH1 amino acid sequence of SEQ ID No: 22 (IMGT), the CDRH2 amino acid sequence of SEQ ID No: 23 (IMGT), and the CDRH3 amino acid sequence of SEQ ID No: 167 (IMGT). The heavy chain nucleic acid sequence of the VH domain is SEQ ID No: 165. Antibody IMPI-O10 has a light chain variable region (VL) amino acid sequence of SEQ ID No: 169, comprising the CDRL1 amino acid sequence of SEQ ID No: 67 (IMGT), the CDRL2 amino acid sequence of SEQ ID No: 28 (IMGT), and the CDRL3 amino acid sequence of SEQ ID No: 69 (IMGT). The light chain nucleic acid sequence of the VL domain is SEQ ID No: 168. The VH domain may be combined with any of the heavy chain constant region sequences described herein (the nucleotide and corresponding amino acid sequences of which are set out in Table 2). The VL domain may be combined with any of the light chain constant region sequences described herein (the nucleotide and corresponding amino acid sequences of which are set out in Table 2).

[1636] Antibody IMPI-017 has a heavy chain variable region (VH) amino acid sequence of SEQ ID No: 171, comprising the CDRH1 amino acid sequence of SEQ ID No: 172 (IMGT), the CDRH2 amino acid sequence of SEQ ID No: 14 (IMGT), and the CDRH3 amino acid sequence of SEQ ID No: 173 (IMGT). The heavy chain nucleic acid sequence of the VH domain is SEQ ID No: 170. Antibody IMPI-017 has a light chain variable region (VL) amino acid sequence of SEQ ID No: 175, comprising the CDRL1 amino acid sequence of SEQ ID No: 176 (IMGT), the CDRL2 amino acid sequence of SEQ ID No: 18 (IMGT), and the CDRL3 amino acid sequence of SEQ ID No: 177 (IMGT). The light chain nucleic acid sequence of the VL domain is SEQ ID No: 174. The VH domain may be combined with any of the heavy chain constant region sequences described herein (the nucleotide and corresponding amino acid sequences of which are set out in Table 2). The VL domain may be combined with any of the light chain constant region sequences described herein (the nucleotide and corresponding amino acid sequences of which are set out in Table 2).

[1637] Antibody IMPI-037 has a heavy chain variable region (VH) amino acid sequence of SEQ ID No: 179, comprising the CDRH1 amino acid sequence of SEQ ID No: 180 (IMGT), the CDRH2 amino acid sequence of SEQ ID No: 181 (IMGT), and the CDRH3 amino acid sequence of SEQ ID No: 182 (IMGT). The heavy chain nucleic acid sequence of the VH domain is SEQ ID No: 178. Antibody IMPI-037 has a light chain variable region (VL) amino acid sequence of SEQ ID No: 184, comprising the CDRL1 amino acid sequence of SEQ ID No: 185 (IMGT), the CDRL2 amino acid sequence of SEQ ID No: 18 (IMGT), and the CDRL3 amino acid sequence of SEQ ID No: 186 (IMGT). The light chain nucleic acid sequence of the VL domain is SEQ ID No: 183. The VH domain may be combined with any of the heavy chain constant region sequences described herein (the nucleotide and corresponding amino acid sequences of which are set out in Table 2). The VL domain may be combined with any of the light chain constant region sequences described herein (the nucleotide and corresponding amino acid sequences of which are set out in Table 2). The sequences of antibody IMPI-037 are of particular interest in the present invention.

[1638] Antibody IMPI-022 has a heavy chain variable region (VH) amino acid sequence of SEQ ID No: 188, comprising the CDRH1 amino acid sequence of SEQ ID No: 22 (IMGT), the CDRH2 amino acid sequence of SEQ ID No: 63 (IMGT), and the CDRH3 amino acid sequence of SEQ ID No: 147 (IMGT). The heavy chain nucleic acid sequence of the VH domain is SEQ ID No: 187. Antibody IMPI-022 has a light chain variable region (VL) amino acid sequence of SEQ ID No: 190, comprising the CDRL1 amino acid sequence of SEQ ID No: 37 (IMGT), the CDRL2 amino acid sequence of SEQ ID No: 28 (IMGT), and the CDRL3 amino acid sequence of SEQ ID No: 69 (IMGT). The light chain nucleic acid sequence of the VL domain is SEQ ID No: 189. The VH domain may be combined with any of the heavy chain constant region sequences described herein (the nucleotide and corresponding amino acid sequences of which are set out in Table 2). The VL domain may be combined with any of the light chain constant region sequences described herein (the nucleotide and corresponding amino acid sequences of which are set out in Table 2).

[1639] Antibody IMPI-058 has a heavy chain variable region (VH) amino acid sequence of SEQ ID No: 192, comprising the CDRH1 amino acid sequence of SEQ ID No: 193 (IMGT), the CDRH2 amino acid sequence of SEQ ID No: 194 (IMGT), and the CDRH3 amino acid sequence of SEQ ID No: 34 (IMGT). The heavy chain nucleic acid sequence of the VH domain is SEQ ID No: 191. Antibody IMPI-058 has a light chain variable region (VL) amino acid sequence of SEQ ID No: 196, comprising the CDRL1 amino acid sequence of SEQ ID No: 37 (IMGT), the CDRL2 amino acid sequence of SEQ ID No: 28 (IMGT), and the CDRL3 amino acid sequence of SEQ ID No: 197 (IMGT). The light chain nucleic acid sequence of the VL domain is SEQ ID No: 195. The VH domain may be combined with any of the heavy chain constant region sequences described herein (the nucleotide and corresponding amino acid sequences of which are set out in Table 2). The VL domain may be combined with any of the light chain constant region sequences described herein (the nucleotide and corresponding amino acid sequences of which are set out in Table 2).

[1640] Antibody IMPI-024 has a heavy chain variable region (VH) amino acid sequence of SEQ ID No: 199, comprising the CDRH1 amino acid sequence of SEQ ID No: 32 (IMGT), the CDRH2 amino acid sequence of SEQ ID No: 33 (IMGT), and the CDRH3 amino acid sequence of SEQ ID No: 200 (IMGT). The heavy chain nucleic acid sequence of the VH domain is SEQ ID No: 198. Antibody IMPI-024 has a light chain variable region (VL) amino acid sequence of SEQ ID No: 202, comprising the CDRL1 amino acid sequence of SEQ ID No: 92 (IMGT), the CDRL2 amino acid sequence of SEQ ID No: 203 (IMGT), and the CDRL3 amino acid sequence of SEQ ID No: 204 (IMGT). The light chain nucleic acid sequence of the VL domain is SEQ ID No: 201. The VH domain may be combined with any of the heavy chain constant region sequences described herein (the nucleotide and corresponding amino acid sequences of which are set out in Table 2). The VL domain may be combined with any of the light chain constant region sequences described herein (the nucleotide and corresponding amino acid sequences of which are set out in Table 2).

[1641] Antibody IMPI-039 has a heavy chain variable region (VH) amino acid sequence of SEQ ID No: 206, comprising the CDRH1 amino acid sequence of SEQ ID No: 79 (IMGT), the CDRH2 amino acid sequence of SEQ ID No: 80 (IMGT), and the CDRH3 amino acid sequence of SEQ ID No: 207 (IMGT). The heavy chain nucleic acid sequence of the VH domain is SEQ ID No: 205. Antibody IMPI-039 has a light chain variable region (VL) amino acid sequence of SEQ ID No: 209, comprising the CDRL1 amino acid sequence of SEQ ID No: 84 (IMGT), the CDRL2 amino acid sequence of SEQ ID No: 85 (IMGT), and the CDRL3 amino acid sequence of SEQ ID No: 86 (IMGT). The light chain nucleic acid sequence of the VL domain is SEQ ID No: 208. The VH domain may be combined with any of the heavy chain constant region sequences described herein (the nucleotide and corresponding amino acid sequences of which are set out in Table 2). The VL domain may be combined with any of the light chain constant region sequences described herein (the nucleotide and corresponding amino acid sequences of which are set out in Table 2).

[1642] Antibody IMPI-020 has a heavy chain variable region (VH) amino acid sequence of SEQ ID No: 211, comprising the CDRH1 amino acid sequence of SEQ ID No: 212 (IMGT), the CDRH2 amino acid sequence of SEQ ID No: 140 (IMGT), and the CDRH3 amino acid sequence of SEQ ID No: 133 (IMGT). The heavy chain nucleic acid sequence of the VH domain is SEQ ID No: 210. Antibody IMPI-020 has a light chain variable region (VL) amino acid sequence of SEQ ID No: 214, comprising the CDRL1 amino acid sequence of SEQ ID No: 84 (IMGT), the CDRL2 amino acid sequence of SEQ ID No: 85 (IMGT), and the CDRL3 amino acid sequence of SEQ ID No: 86 (IMGT). The light chain nucleic acid sequence of the VL domain is SEQ ID No: 213. The VH domain may be combined with any of the heavy chain constant region sequences described herein (the nucleotide and corresponding amino acid sequences of which are set out in Table 2). The VL domain may be combined with any of the light chain constant region sequences described herein (the nucleotide and corresponding amino acid sequences of which are set out in Table 2).

[1643] Antibody IMPI-053 has a heavy chain variable region (VH) amino acid sequence of SEQ ID No: 216, comprising the CDRH1 amino acid sequence of SEQ ID No: 79 (IMGT), the CDRH2 amino acid sequence of SEQ ID No: 140 (IMGT), and the CDRH3 amino acid sequence of SEQ ID No: 207 (IMGT). The heavy chain nucleic acid sequence of the VH domain is SEQ ID No: 215. Antibody IMPI-053 has a light chain variable region (VL) amino acid sequence of SEQ ID No: 218, comprising the CDRL1 amino acid sequence of SEQ ID No: 219 (IMGT), the CDRL2 amino acid sequence of SEQ ID No: 85 (IMGT), and the CDRL3 amino acid sequence of SEQ ID No: 86 (IMGT). The light chain nucleic acid sequence of the VL domain is SEQ ID No: 217. The VH domain may be combined with any of the heavy chain constant region sequences described herein (the nucleotide and corresponding amino acid sequences of which are set out in Table 2). The VL domain may be combined with any of the light chain constant region sequences described herein (the nucleotide and corresponding amino acid sequences of which are set out in Table 2).

[1644] Antibody IMPI-021 has a heavy chain variable region (VH) amino acid sequence of SEQ ID No: 221, comprising the CDRH1 amino acid sequence of SEQ ID No: 3 (IMGT), the CDRH2 amino acid sequence of SEQ ID No: 14 (IMGT), and the CDRH3 amino acid sequence of SEQ ID No: 222 (IMGT). The heavy chain nucleic acid sequence of the VH domain is SEQ ID No: 220. Antibody IMPI-021 has a light chain variable region (VL) amino acid sequence of SEQ ID No: 224, comprising the CDRL1 amino acid sequence of SEQ ID No: 8 (IMGT), the CDRL2 amino acid sequence of SEQ ID No: 18 (IMGT), and the CDRL3 amino acid sequence of SEQ ID No: 225 (IMGT). The light chain nucleic acid sequence of the VL domain is SEQ ID No: 223. The VH domain may be combined with any of the heavy chain constant region sequences described herein (the nucleotide and corresponding amino acid sequences of which are set out in Table 2). The VL domain may be combined with any of the light chain constant region sequences described herein (the nucleotide and corresponding amino acid sequences of which are set out in Table 2).

[1645] Antibody IMPI-032 has a heavy chain variable region (VH) amino acid sequence of SEQ ID No: 227, comprising the CDRH1 amino acid sequence of SEQ ID No: 228 (IMGT), the CDRH2 amino acid sequence of SEQ ID No: 132 (IMGT), and the CDRH3 amino acid sequence of SEQ ID No: 133 (IMGT). The heavy chain nucleic acid sequence of the VH domain is SEQ ID No: 226. Antibody IMPI-032 has a light chain variable region (VL) amino acid sequence of SEQ ID No: 230, comprising the CDRL1 amino acid sequence of SEQ ID No: 136 (IMGT), the CDRL2 amino acid sequence of SEQ ID No: 85 (IMGT), and the CDRL3 amino acid sequence of SEQ ID No: 86 (IMGT). The light chain nucleic acid sequence of the VL domain is SEQ ID No: 229. The VH domain may be combined with any of the heavy chain constant region sequences described herein (the nucleotide and corresponding amino acid sequences of which are set out in Table 2). The VL domain may be combined with any of the light chain constant region sequences described herein (the nucleotide and corresponding amino acid sequences of which are set out in Table 2).

[1646] Antibody IMPI-001 has a heavy chain variable region (VH) amino acid sequence of SEQ ID No: 227, comprising the CDRH1 amino acid sequence of SEQ ID No: 228 (IMGT), the CDRH2 amino acid sequence of SEQ ID No: 132 (IMGT), and the CDRH3 amino acid sequence of SEQ ID No: 133 (IMGT). The heavy chain nucleic acid sequence of the VH domain is SEQ ID No: 226. Antibody IMPI-001 has a light chain variable region (VL) amino acid sequence of SEQ ID No: 232, comprising the CDRL1 amino acid sequence of SEQ ID No: 144 (IMGT), the CDRL2 amino acid sequence of SEQ ID No: 85 (IMGT), and the CDRL3 amino acid sequence of SEQ ID No: 86 (IMGT). The light chain nucleic acid sequence of the VL domain is SEQ ID No: 231. The VH domain may be combined with any of the heavy chain constant region sequences described herein (the nucleotide and corresponding amino acid sequences of which are set out in Table 2). The VL domain may be combined with any of the light chain constant region sequences described herein (the nucleotide and corresponding amino acid sequences of which are set out in Table 2).

[1647] Antibody IMPI-041 has a heavy chain variable region (VH) amino acid sequence of SEQ ID No: 234, comprising the CDRH1 amino acid sequence of SEQ ID No 121 (IMGT), the CDRH2 amino acid sequence of SEQ ID No: 235 (IMGT), and the CDRH3 amino acid sequence of SEQ ID No: 236 (IMGT). The heavy chain nucleic acid sequence of the VH domain is SEQ ID No: 233. Antibody IMPI-041 has a light chain variable region (VL) amino acid sequence of SEQ ID No: 238, comprising the CDRL1 amino acid sequence of SEQ ID No: 126 (IMGT), the CDRL2 amino acid sequence of SEQ ID No: 239 (IMGT), and the CDRL3 amino acid sequence of SEQ ID No: 128 (IMGT). The light chain nucleic acid sequence of the VL domain is SEQ ID No: 237. The VH domain may be combined with any of the heavy chain constant region sequences described herein (the nucleotide and corresponding amino acid sequences of which are set out in Table 2). The VL domain may be combined with any of the light chain constant region sequences described herein (the nucleotide and corresponding amino acid sequences of which are set out in Table 2). Antibody IMPI-029 has a heavy chain variable region (VH) amino acid sequence of SEQ ID No: 241, comprising the CDRH1 amino acid sequence of SEQ ID No: 3 (IMGT), the CDRH2 amino acid sequence of SEQ ID No: 14 (IMGT), and the CDRH3 amino acid sequence of SEQ ID No: 106 (IMGT). The heavy chain nucleic acid sequence of the VH domain is SEQ ID No: 240. Antibody IMPI-029 has a light chain variable region (VL) amino acid sequence of SEQ ID No: 108, comprising the CDRL1 amino acid sequence of SEQ ID No: 8 (IMGT), the CDRL2 amino acid sequence of SEQ ID No: 18 (IMGT), and the CDRL3 amino acid sequence of SEQ ID No: 109 (IMGT). The light chain nucleic acid sequence of the VL domain is SEQ ID No: 107. The VH domain may be combined with any of the heavy chain constant region sequences described herein (the nucleotide and corresponding amino acid sequences of which are set out in Table 2). The VL domain may be combined with any of the light chain constant region sequences described herein (the nucleotide and corresponding amino acid sequences of which are set out in Table 2).

[1648] Antibody IMPI-009 has a heavy chain variable region (VH) amino acid sequence of SEQ ID No: 243, comprising the CDRH1 amino acid sequence of SEQ ID No: 32 (IMGT), the CDRH2 amino acid sequence of SEQ ID No: 33 (IMGT), and the CDRH3 amino acid sequence of SEQ ID No: 34 (IMGT). The heavy chain nucleic acid sequence of the VH domain is SEQ ID No: 242. Antibody X has a light chain variable region (VL) amino acid sequence of SEQ ID No: 245, comprising the CDRL1 amino acid sequence of SEQ ID No: 92 (IMGT), the CDRL2 amino acid sequence of SEQ ID No: 28 (IMGT), and the CDRL3 amino acid sequence of SEQ ID No: 246 (IMGT). The light chain nucleic acid sequence of the VL domain is SEQ ID No: 244. The VH domain may be combined with any of the heavy chain constant region sequences described herein (the nucleotide and corresponding amino acid sequences of which are set out in Table 2). The VL domain may be combined with any of the light chain constant region sequences described herein (the nucleotide and corresponding amino acid sequences of which are set out in Table 2).

[1649] Antibody IMPI-006 has a heavy chain variable region (VH) amino acid sequence of SEQ ID No: 248, comprising the CDRH1 amino acid sequence of SEQ ID No: 249 (IMGT), the CDRH2 amino acid sequence of SEQ ID No: 250 (IMGT), and the CDRH3 amino acid sequence of SEQ ID No: 251 (IMGT). The heavy chain nucleic acid sequence of the VH domain is SEQ ID No: 247. Antibody IMPI-006 has a light chain variable region (VL) amino acid sequence of SEQ ID No: 253, comprising the CDRL1 amino acid sequence of SEQ ID No: 254 (IMGT), the CDRL2 amino acid sequence of SEQ ID No: 28 (IMGT), and the CDRL3 amino acid sequence of SEQ ID No: 255 (IMGT). The light chain nucleic acid sequence of the VL domain is SEQ ID No: 252. The VH domain may be combined with any of the heavy chain constant region sequences described herein (the nucleotide and corresponding amino acid sequences of which are set out in Table 2). The VL domain may be combined with any of the light chain constant region sequences described herein (the nucleotide and corresponding amino acid sequences of which are set out in Table 2). Antibody IMPI-054 has a heavy chain variable region (VH) amino acid sequence of SEQ ID No: 257, comprising the CDRH1 amino acid sequence of SEQ ID No: 172 (IMGT), the CDRH2 amino acid sequence of SEQ ID No: 14 (IMGT), and the CDRH3 amino acid sequence of SEQ ID No: 258 (IMGT). The heavy chain nucleic acid sequence of the VH domain is SEQ ID No: 256. Antibody IMPI-054 has a light chain variable region (VL) amino acid sequence of SEQ ID No: 260, comprising the CDRL1 amino acid sequence of SEQ ID No: 261 (IMGT), the CDRL2 amino acid sequence of SEQ ID No: 262 (IMGT), and the CDRL3 amino acid sequence of SEQ ID No: 263 (IMGT). The light chain nucleic acid sequence of the VL domain is SEQ ID No: 259. The VH domain may be combined with any of the heavy chain constant region sequences described herein (the nucleotide and corresponding amino acid sequences of which are set out in Table 2). The VL domain may be combined with any of the light chain constant region sequences described herein (the nucleotide and corresponding amino acid sequences of which are set out in Table 2). Antibody IMPI-044 has a heavy chain variable region (VH) amino acid sequence of SEQ ID No: 265, comprising the CDRH1 amino acid sequence of SEQ ID No: 32 (IMGT), the CDRH2 amino acid sequence of SEQ ID No: 33 (IMGT), and the CDRH3 amino acid sequence of SEQ ID No: 34 (IMGT). The heavy chain nucleic acid sequence of the VH domain is SEQ ID No: 264. Antibody IMPI-044 has a light chain variable region (VL) amino acid sequence of SEQ ID No: 267, comprising the CDRL1 amino acid sequence of SEQ ID No: 92 (IMGT), the CDRL2 amino acid sequence of SEQ ID No: 203 (IMGT), and the CDRL3 amino acid sequence of SEQ ID No: 204 (IMGT). The light chain nucleic acid sequence of the VL domain is SEQ ID No: 266. The VH domain may be combined with any of the heavy chain constant region sequences described herein (the nucleotide and corresponding amino acid sequences of which are set out in Table 2). The VL domain may be combined with any of the light chain constant region sequences described herein (the nucleotide and corresponding amino acid sequences of which are set out in Table 2).

[1650] Antibody IMPI-002 has a heavy chain variable region (VH) amino acid sequence of SEQ ID No: 26, comprising the CDRH1 amino acid sequence of SEQ ID No: 3 (IMGT), the CDRH2 amino acid sequence of SEQ ID No: 14 (IMGT), and the CDRH3 amino acid sequence of SEQ ID No: 5 (IMGT). The heavy chain nucleic acid sequence of the VH domain is SEQ ID No: 268. Antibody IMPI-002 has a light chain variable region (VL) amino acid sequence of SEQ ID No: 271, comprising the CDRL1 amino acid sequence of SEQ ID No: 8 (IMGT), the CDRL2 amino acid sequence of SEQ ID No: 18 (IMGT), and the CDRL3 amino acid sequence of SEQ ID No: 10 (IMGT). The light chain nucleic acid sequence of the VL domain is SEQ ID No: 270. The VH domain may be combined with any of the heavy chain constant region sequences described herein (the nucleotide and corresponding amino acid sequences of which are set out in Table 2). The VL domain may be combined with any of the light chain constant region sequences described herein (the nucleotide and corresponding amino acid sequences of which are set out in Table 2).

[1651] Antibody IMPI-027 has a heavy chain variable region (VH) amino acid sequence of SEQ ID No: 273, comprising the CDRH1 amino acid sequence of SEQ ID No: 41 (IMGT), the CDRH2 amino acid sequence of SEQ ID No: 42 (IMGT), and the CDRH3 amino acid sequence of SEQ ID No: 43 (IMGT). The heavy chain nucleic acid sequence of the VH domain is SEQ ID No: 272. Antibody IMPI-027 has a light chain variable region (VL) amino acid sequence of SEQ ID No: 275, comprising the CDRL1 amino acid sequence of SEQ ID No: 37 (IMGT), the CDRL2 amino acid sequence of SEQ ID No: 28 (IMGT), and the CDRL3 amino acid sequence of SEQ ID No: 47 (IMGT). The light chain nucleic acid sequence of the VL domain is SEQ ID No: 274. The VH domain may be combined with any of the heavy chain constant region sequences described herein (the nucleotide and corresponding amino acid sequences of which are set out in Table 2). The VL domain may be combined with any of the light chain constant region sequences described herein (the nucleotide and corresponding amino acid sequences of which are set out in Table 2).

[1652] Antibody IMPI-011 has a heavy chain variable region (VH) amino acid sequence of SEQ ID No: 265, comprising the CDRH1 amino acid sequence of SEQ ID No: 32 (IMGT), the CDRH2 amino acid sequence of SEQ ID No: 33 (IMGT), and the CDRH3 amino acid sequence of SEQ ID No: 34 (IMGT). The heavy chain nucleic acid sequence of the VH domain is SEQ ID No: 264. Antibody IMPI-O 11 has a light chain variable region (VL) amino acid sequence of SEQ ID No: 277, comprising the CDRL1 amino acid sequence of SEQ ID No: 92 (IMGT), the CDRL2 amino acid sequence of SEQ ID No: 28 (IMGT), and the CDRL3 amino acid sequence of SEQ ID No: 76 (IMGT). The light chain nucleic acid sequence of the VL domain is SEQ ID No: 276. The VH domain may be combined with any of the heavy chain constant region sequences described herein (the nucleotide and corresponding amino acid sequences of which are set out in Table 2). The VL domain may be combined with any of the light chain constant region sequences described herein (the nucleotide and corresponding amino acid sequences of which are set out in Table 2). Antibody IMPI-033 has a heavy chain variable region (VH) amino acid sequence of SEQ ID No: 279, comprising the CDRH1 amino acid sequence of SEQ ID No: 41 (IMGT), the CDRH2 amino acid sequence of SEQ ID No: 42 (IMGT), and the CDRH3 amino acid sequence of SEQ ID No: 43 (IMGT). The heavy chain nucleic acid sequence of the VH domain is SEQ ID No: 278. Antibody IMPI-033 has a light chain variable region (VL) amino acid sequence of SEQ ID No: 281, comprising the CDRL1 amino acid sequence of SEQ ID No: 37 (IMGT), the CDRL2 amino acid sequence of SEQ ID No: 28 (IMGT), and the CDRL3 amino acid sequence of SEQ ID No: 282 (IMGT). The light chain nucleic acid sequence of the VL domain is SEQ ID No: 280. The VH domain may be combined with any of the heavy chain constant region sequences described herein (the nucleotide and corresponding amino acid sequences of which are set out in Table 2). The VL domain may be combined with any of the light chain constant region sequences described herein (the nucleotide and corresponding amino acid sequences of which are set out in Table 2). Antibody IMPI-055 has a heavy chain variable region (VH) amino acid sequence of SEQ ID No: 284, comprising the CDRH1 amino acid sequence of SEQ ID No: 121 (IMGT), the CDRH2 amino acid sequence of SEQ ID No: 235 (IMGT), and the CDRH3 amino acid sequence of SEQ ID No: 285 (IMGT). The heavy chain nucleic acid sequence of the VH domain is SEQ ID No: 283. Antibody IMPI-055 has a light chain variable region (VL) amino acid sequence of SEQ ID No: 287, comprising the CDRL1 amino acid sequence of SEQ ID No: 126 (IMGT), the CDRL2 amino acid sequence of SEQ ID No: 288 (IMGT), and the CDRL3 amino acid sequence of SEQ ID No: 128 (IMGT). The light chain nucleic acid sequence of the VL domain is SEQ ID No: 286. The VH domain may be combined with any of the heavy chain constant region sequences described herein (the nucleotide and corresponding amino acid sequences of which are set out in Table 2). The VL domain may be combined with any of the light chain constant region sequences described herein (the nucleotide and corresponding amino acid sequences of which are set out in Table 2). Antibody IMPI-049 has a heavy chain variable region (VH) amino acid sequence of SEQ ID No: 199, comprising the CDRH1 amino acid sequence of SEQ ID No: 32 (IMGT), the CDRH2 amino acid sequence of SEQ ID No: 33 (IMGT), and the CDRH3 amino acid sequence of SEQ ID No: 200 (IMGT). The heavy chain nucleic acid sequence of the VH domain is SEQ ID No: 198. Antibody IMPI-049 has a light chain variable region (VL) amino acid sequence of SEQ ID No: 267, comprising the CDRL1 amino acid sequence of SEQ ID No: 92 (IMGT), the CDRL2 amino acid sequence of SEQ ID No: 203 (IMGT), and the CDRL3 amino acid sequence of SEQ ID No: 204 (IMGT). The light chain nucleic acid sequence of the VL domain is SEQ ID No: 289. The VH domain may be combined with any of the heavy chain constant region sequences described herein (the nucleotide and corresponding amino acid sequences of which are set out in Table 2). The VL domain may be combined with any of the light chain constant region sequences described herein (the nucleotide and corresponding amino acid sequences of which are set out in Table 2). Antibody IMPI-042 has a heavy chain variable region (VH) amino acid sequence of SEQ ID No: 257, comprising the CDRH1 amino acid sequence of SEQ ID No: 172 (IMGT), the CDRH2 amino acid sequence of SEQ ID No: 14 (IMGT), and the CDRH3 amino acid sequence of SEQ ID No: 258 (IMGT). The heavy chain nucleic acid sequence of the VH domain is SEQ ID No: 290. Antibody IMPI-042 has a light chain variable region (VL) amino acid sequence of SEQ ID No: 292, comprising the CDRL1 amino acid sequence of SEQ ID No: 261 (IMGT), the CDRL2 amino acid sequence of SEQ ID No: 262 (IMGT), and the CDRL3 amino acid sequence of SEQ ID No: 263 (IMGT). The light chain nucleic acid sequence of the VL domain is SEQ ID No: 291. The VH domain may be combined with any of the heavy chain constant region sequences described herein (the nucleotide and corresponding amino acid sequences of which are set out in Table 2). The VL domain may be combined with any of the light chain constant region sequences described herein (the nucleotide and corresponding amino acid sequences of which are set out in Table 2). Antibody IMPI-035 has a heavy chain variable region (VH) amino acid sequence of SEQ ID No: 294, comprising the CDRH1 amino acid sequence of SEQ ID No: 22 (IMGT), the CDRH2 amino acid sequence of SEQ ID No: 23 (IMGT), and the CDRH3 amino acid sequence of SEQ ID No: 147 (IMGT). The heavy chain nucleic acid sequence of the VH domain is SEQ ID No: 293. Antibody IMPI-035 has a light chain variable region (VL) amino acid sequence of SEQ ID No: 296, comprising the CDRL1 amino acid sequence of SEQ ID No: 37 (IMGT), the CDRL2 amino acid sequence of SEQ ID No: 28 (IMGT), and the CDRL3 amino acid sequence of SEQ ID No: 69 (IMGT). The light chain nucleic acid sequence of the VL domain is SEQ ID No: 295. The VH domain may be combined with any of the heavy chain constant region sequences described herein (the nucleotide and corresponding amino acid sequences of which are set out in Table 2). The VL domain may be combined with any of the light chain constant region sequences described herein (the nucleotide and corresponding amino acid sequences of which are set out in Table 2). Antibody IMPI-028 has a heavy chain variable region (VH) amino acid sequence of SEQ ID No: 298, comprising the CDRH1 amino acid sequence of SEQ ID No: 13 (IMGT), the CDRH2 amino acid sequence of SEQ ID No: 14 (IMGT), and the CDRH3 amino acid sequence of SEQ ID No: 299 (IMGT). The heavy chain nucleic acid sequence of the VH domain is SEQ ID No: 297. Antibody IMPI-028 has a light chain variable region (VL) amino acid sequence of SEQ ID No: 301, comprising the CDRL1 amino acid sequence of SEQ ID No: 302 (IMGT), the CDRL2 amino acid sequence of SEQ ID No: 157 (IMGT), and the CDRL3 amino acid sequence of SEQ ID No: 303 (IMGT). The light chain nucleic acid sequence of the VL domain is SEQ ID No: 300. The VH domain may be combined with any of the heavy chain constant region sequences described herein (the nucleotide and corresponding amino acid sequences of which are set out in Table 2). The VL domain may be combined with any of the light chain constant region sequences described herein (the nucleotide and corresponding amino acid sequences of which are set out in Table 2). Antibody IMPI-018 has a heavy chain variable region (VH) amino acid sequence of SEQ ID No: 305, comprising the CDRH1 amino acid sequence of SEQ ID No: 306 (IMGT), the CDRH2 amino acid sequence of SEQ ID No: 42 (IMGT), and the CDRH3 amino acid sequence of SEQ ID No: 307 (IMGT). The heavy chain nucleic acid sequence of the VH domain is SEQ ID No: 304. Antibody IMPI-018 has a light chain variable region (VL) amino acid sequence of SEQ ID No: 309, comprising the CDRL1 amino acid sequence of SEQ ID No: 37 (IMGT), the CDRL2 amino acid sequence of SEQ ID No: 28 (IMGT), and the CDRL3 amino acid sequence of SEQ ID No: 47 (IMGT). The light chain nucleic acid sequence of the VL domain is SEQ ID No: 308. The VH domain may be combined with any of the heavy chain constant region sequences described herein (the nucleotide and corresponding amino acid sequences of which are set out in Table 2). The VL domain may be combined with any of the light chain constant region sequences described herein (the nucleotide and corresponding amino acid sequences of which are set out in Table 2). Antibody IMPI-050 has a heavy chain variable region (VH) amino acid sequence of SEQ ID No: 265, comprising the CDRH1 amino acid sequence of SEQ ID No 32 (IMGT), the CDRH2 amino acid sequence of SEQ ID No: 33 (IMGT), and the CDRH3 amino acid sequence of SEQ ID No: 34 (IMGT). The heavy chain nucleic acid sequence of the VH domain is SEQ ID No: 264. Antibody IMPI-050 has a light chain variable region (VL) amino acid sequence of SEQ ID No: 31, comprising the CDRL1 amino acid sequence of SEQ ID No: 312 (IMGT), the CDRL2 amino acid sequence of SEQ ID No: 203 (IMGT), and the CDRL3 amino acid sequence of SEQ ID No: 93 (IMGT). The light chain nucleic acid sequence of the VL domain is SEQ ID No: 310. The VH domain may be combined with any of the heavy chain constant region sequences described herein (the nucleotide and corresponding amino acid sequences of which are set out in Table 2). The VL domain may be combined with any of the light chain constant region sequences described herein (the nucleotide and corresponding amino acid sequences of which are set out in Table 2). Antibody IMPI-016 has a heavy chain variable region (VH) amino acid sequence of SEQ ID No: 265, comprising the CDRH1 amino acid sequence of SEQ ID No 32 (IMGT), the CDRH2 amino acid sequence of SEQ ID No: 33 (IMGT), and the CDRH3 amino acid sequence of SEQ ID No: 34 (IMGT). The heavy chain nucleic acid sequence of the VH domain is SEQ ID No: 264. Antibody IMPI-016 has a light chain variable region (VL) amino acid sequence of SEQ ID No: 314, comprising the CDRL1 amino acid sequence of SEQ ID No: 92 (IMGT), the CDRL2 amino acid sequence of SEQ ID No: 28 (IMGT), and the CDRL3 amino acid sequence of SEQ ID No: 76 (IMGT). The light chain nucleic acid sequence of the VL domain is SEQ ID No: 313. The VH domain may be combined with any of the heavy chain constant region sequences described herein (the nucleotide and corresponding amino acid sequences of which are set out in Table 2). The VL domain may be combined with any of the light chain constant region sequences described herein (the nucleotide and corresponding amino acid sequences of which are set out in Table 2). Antibody IMPI-040 has a heavy chain variable region (VH) amino acid sequence of SEQ ID No: 316, comprising the CDRH1 amino acid sequence of SEQ ID No: 131 (IMGT), the CDRH2 amino acid sequence of SEQ ID No: 140 (IMGT), and the CDRH3 amino acid sequence of SEQ ID No: 317 (IMGT). The heavy chain nucleic acid sequence of the VH domain is SEQ ID No: 315. Antibody IMPI-040 has a light chain variable region (VL) amino acid sequence of SEQ ID No: 319, comprising the CDRL1 amino acid sequence of SEQ ID No: 144 (IMGT), the CDRL2 amino acid sequence of SEQ ID No: 85 (IMGT), and the CDRL3 amino acid sequence of SEQ ID No: 86 (IMGT). The light chain nucleic acid sequence of the VL domain is SEQ ID No: 318. The VH domain may be combined with any of the heavy chain constant region sequences described herein (the nucleotide and corresponding amino acid sequences of which are set out in Table 2). The VL domain may be combined with any of the light chain constant region sequences described herein (the nucleotide and corresponding amino acid sequences of which are set out in Table 2). Antibody IMPI-030 has a heavy chain variable region (VH) amino acid sequence of SEQ ID No: 78, comprising the CDRH1 amino acid sequence of SEQ ID No: 79 (IMGT), the CDRH2 amino acid sequence of SEQ ID No: 80 (IMGT), and the CDRH3 amino acid sequence of SEQ ID No: 81 (IMGT). The heavy chain nucleic acid sequence of the VH domain is SEQ ID No: 77. Antibody IMPI-030 has a light chain variable region (VL) amino acid sequence of SEQ ID No: 321, comprising the CDRL1 amino acid sequence of SEQ ID No: 84 (IMGT), the CDRL2 amino acid sequence of SEQ ID No: 85 (IMGT), and the CDRL3 amino acid sequence of SEQ ID No: 86 (IMGT). The light chain nucleic acid sequence of the VL domain is SEQ ID No: 320. The VH domain may be combined with any of the heavy chain constant region sequences described herein (the nucleotide and corresponding amino acid sequences of which are set out in Table 2). The VL domain may be combined with any of the light chain constant region sequences described herein (the nucleotide and corresponding amino acid sequences of which are set out in Table 2). Antibody IMPI-034 has a heavy chain variable region (VH) amino acid sequence of SEQ ID No: 265, comprising the CDRH1 amino acid sequence of SEQ ID No: 32 (IMGT), the CDRH2 amino acid sequence of SEQ ID No: 33 (IMGT), and the CDRH3 amino acid sequence of SEQ ID No: 34 (IMGT). The heavy chain nucleic acid sequence of the VH domain is SEQ ID No: 264. Antibody IMPI-034 has a light chain variable region (VL) amino acid sequence of SEQ ID No: 323, comprising the CDRL1 amino acid sequence of SEQ ID No: 324 (IMGT), the CDRL2 amino acid sequence of SEQ ID No: 203 (IMGT), and the CDRL3 amino acid sequence of SEQ ID No: 93 (IMGT). The light chain nucleic acid sequence of the VL domain is SEQ ID No: 322. The VH domain may be combined with any of the heavy chain constant region sequences described herein (the nucleotide and corresponding amino acid sequences of which are set out in Table 2). The VL domain may be combined with any of the light chain constant region sequences described herein (the nucleotide and corresponding amino acid sequences of which are set out in Table 2). Antibody IMPI-013 has a heavy chain variable region (VH) amino acid sequence of SEQ ID No: 326, comprising the CDRH1 amino acid sequence of SEQ ID No: 22 (IMGT), the CDRH2 amino acid sequence of SEQ ID No: 23 (IMGT), and the CDRH3 amino acid sequence of SEQ ID No: 327 (IMGT). The heavy chain nucleic acid sequence of the VH domain is SEQ ID No: 325. Antibody IMPI-013 has a light chain variable region (VL) amino acid sequence of SEQ ID No: 329, comprising the CDRL1 amino acid sequence of SEQ ID No: 27 (IMGT), the CDRL2 amino acid sequence of SEQ ID No: 28 (IMGT), and the CDRL3 amino acid sequence of SEQ ID No: 29 (IMGT). The light chain nucleic acid sequence of the VL domain is SEQ ID No: 328. The VH domain may be combined with any of the heavy chain constant region sequences described herein (the nucleotide and corresponding amino acid sequences of which are set out in Table 2). The VL domain may be combined with any of the light chain constant region sequences described herein (the nucleotide and corresponding amino acid sequences of which are set out in Table 2). Antibody IMPI-026 has a heavy chain variable region (VH) amino acid sequence of SEQ ID No: 331, comprising the CDRH1 amino acid sequence of SEQ ID No: 32 (IMGT), the CDRH2 amino acid sequence of SEQ ID No: 33 (IMGT), and the CDRH3 amino acid sequence of SEQ ID No: 34 (IMGT). The heavy chain nucleic acid sequence of the VH domain is SEQ ID No: 330. Antibody IMPI-026 has a light chain variable region (VL) amino acid sequence of SEQ ID No: 333, comprising the CDRL1 amino acid sequence of SEQ ID No: 37 (IMGT), the CDRL2 amino acid sequence of SEQ ID No: 28 (IMGT), and the CDRL3 amino acid sequence of SEQ ID No: 76 (IMGT). The light chain nucleic acid sequence of the VL domain is SEQ ID No: 332. The VH domain may be combined with any of the heavy chain constant region sequences described herein (the nucleotide and corresponding amino acid sequences of which are set out in Table 2). The VL domain may be combined with any of the light chain constant region sequences described herein (the nucleotide and corresponding amino acid sequences of which are set out in Table 2). Antibody IMPI-007 has a heavy chain variable region (VH) amino acid sequence of SEQ ID No: 335, comprising the CDRH1 amino acid sequence of SEQ ID No: 336 (IMGT), the CDRH2 amino acid sequence of SEQ ID No: 140 (IMGT), and the CDRH3 amino acid sequence of SEQ ID No: 337 (IMGT). The heavy chain nucleic acid sequence of the VH domain is SEQ ID No: 334. Antibody IMPI-007 has a light chain variable region (VL) amino acid sequence of SEQ ID No: 339, comprising the CDRL1 amino acid sequence of SEQ ID No: 84 (IMGT), the CDRL2 amino acid sequence of SEQ ID No: 85 (IMGT), and the CDRL3 amino acid sequence of SEQ ID No: 86 (IMGT). The light chain nucleic acid sequence of the VL domain is SEQ ID No: 338. The VH domain may be combined with any of the heavy chain constant region sequences described herein (the nucleotide and corresponding amino acid sequences of which are set out in Table 2). The VL domain may be combined with any of the light chain constant region sequences described herein (the nucleotide and corresponding amino acid sequences of which are set out in Table 2). Antibody IMPI-046 has a heavy chain variable region (VH) amino acid sequence of SEQ ID No: 341, comprising the CDRH1 amino acid sequence of SEQ ID No: 342 (IMGT), the CDRH2 amino acid sequence of SEQ ID No: 33 (IMGT), and the CDRH3 amino acid sequence of SEQ ID No: 34 (IMGT). The heavy chain nucleic acid sequence of the VH domain is SEQ ID No: 340. Antibody IMPI-046 has a light chain variable region (VL) amino acid sequence of SEQ ID No: 344, comprising the CDRL1 amino acid sequence of SEQ ID No: 37 (IMGT), the CDRL2 amino acid sequence of SEQ ID No: 28 (IMGT), and the CDRL3 amino acid sequence of SEQ ID No: 38 (IMGT). The light chain nucleic acid sequence of the VL domain is SEQ ID No: 343. The VH domain may be combined with any of the heavy chain constant region sequences described herein (the nucleotide and corresponding amino acid sequences of which are set out in Table 2). The VL domain may be combined with any of the light chain constant region sequences described herein (the nucleotide and corresponding amino acid sequences of which are set out in Table 2).

[1653] Antibody IMPI-060 has a heavy chain variable region (VH) amino acid sequence of SEQ ID No: 221, comprising the CDRH1 amino acid sequence of SEQ ID No: 3 (IMGT), the CDRH2 amino acid sequence of SEQ ID No: 14 (IMGT), and the CDRH3 amino acid sequence of SEQ ID No: 222 (IMGT). The heavy chain nucleic acid sequence of the VH domain is SEQ ID No: 220. Antibody IMPI-060 has a light chain variable region (VL) amino acid sequence of SEQ ID No: 346, comprising the CDRL1 amino acid sequence of SEQ ID No: 8 (IMGT), the CDRL2 amino acid sequence of SEQ ID No: 18 (IMGT), and the CDRL3 amino acid sequence of SEQ ID No: 347 (IMGT). The light chain nucleic acid sequence of the VL domain is SEQ ID No: 345. The VH domain may be combined with any of the heavy chain constant region sequences described herein (the nucleotide and corresponding amino acid sequences of which are set out in Table 2). The VL domain may be combined with any of the light chain constant region sequences described herein (the nucleotide and corresponding amino acid sequences of which are set out in Table 2).

[1654] Antibody IMPI-056 has a heavy chain variable region (VH) amino acid sequence of SEQ ID No: 349, comprising the CDRH1 amino acid sequence of SEQ ID No: 172 (IMGT), the CDRH2 amino acid sequence of SEQ ID No: 14 (IMGT), and the CDRH3 amino acid sequence of SEQ ID No: 106 (IMGT). The heavy chain nucleic acid sequence of the VH domain is SEQ ID No: 348. Antibody IMPI-056 has a light chain variable region (VL) amino acid sequence of SEQ ID No: 351, comprising the CDRL1 amino acid sequence of SEQ ID No: 8 (IMGT), the CDRL2 amino acid sequence of SEQ ID No: 18 (IMGT), and the CDRL3 amino acid sequence of SEQ ID No: 10 (IMGT). The light chain nucleic acid sequence of the VL domain is SEQ ID No: 350. The VH domain may be combined with any of the heavy chain constant region sequences described herein (the nucleotide and corresponding amino acid sequences of which are set out in Table 2). The VL domain may be combined with any of the light chain constant region sequences described herein (the nucleotide and corresponding amino acid sequences of which are set out in Table 2).

[1655] Antibody IMPI-061 has a heavy chain variable region (VH) amino acid sequence of SEQ ID No: 353, comprising the CDRH1 amino acid sequence of SEQ ID No: 354 (IMGT), the CDRH2 amino acid sequence of SEQ ID No: 355 (IMGT), and the CDRH3 amino acid sequence of SEQ ID No: 356 (IMGT). The heavy chain nucleic acid sequence of the VH domain is SEQ ID No: 352. Antibody IMPI-061 has a light chain variable region (VL) amino acid sequence of SEQ ID No: 358, comprising the CDRL1 amino acid sequence of SEQ ID No: 359 (IMGT), the CDRL2 amino acid sequence of SEQ ID No: 157 (IMGT), and the CDRL3 amino acid sequence of SEQ ID No: 360 (IMGT). The light chain nucleic acid sequence of the VL domain is SEQ ID No: 357. The VH domain may be combined with any of the heavy chain constant region sequences described herein (the nucleotide and corresponding amino acid sequences of which are set out in Table 2). The VL domain may be combined with any of the light chain constant region sequences described herein (the nucleotide and corresponding amino acid sequences of which are set out in Table 2).

[1656] Antibody IMPI-062 has a heavy chain variable region (VH) amino acid sequence of SEQ ID No: 353, comprising the CDRH1 amino acid sequence of SEQ ID No: 354 (IMGT), the CDRH2 amino acid sequence of SEQ ID No: 355 (IMGT), and the CDRH3 amino acid sequence of SEQ ID No: 356 (IMGT). The heavy chain nucleic acid sequence of the VH domain is SEQ ID No: 361. Antibody IMPI-062 has a light chain variable region (VL) amino acid sequence of SEQ ID No: 363, comprising the CDRL1 amino acid sequence of SEQ ID No: 364 (IMGT), the CDRL2 amino acid sequence of SEQ ID No: 157 (IMGT), and the CDRL3 amino acid sequence of SEQ ID No: 360 (IMGT). The light chain nucleic acid sequence of the VL domain is SEQ ID No: 362. The VH domain may be combined with any of the heavy chain constant region sequences described herein (the nucleotide and corresponding amino acid sequences of which are set out in Table 2). The VL domain may be combined with any of the light chain constant region sequences described herein (the nucleotide and corresponding amino acid sequences of which are set out in Table 2).

[1657] Antibody IMPI-063 has a heavy chain variable region (VH) amino acid sequence of SEQ ID No: 366, comprising the CDRH1 amino acid sequence of SEQ ID No: 354 (IMGT), the CDRH2 amino acid sequence of SEQ ID No: 355 (IMGT), and the CDRH3 amino acid sequence of SEQ ID No: 356 (IMGT). The heavy chain nucleic acid sequence of the VH domain is SEQ ID No: 365. Antibody IMPI-063 has a light chain variable region (VL) amino acid sequence of SEQ ID No: 368, comprising the CDRL1 amino acid sequence of SEQ ID No: 369 (IMGT), the CDRL2 amino acid sequence of SEQ ID No: 157 (IMGT), and the CDRL3 amino acid sequence of SEQ ID No: 360 (IMGT). The light chain nucleic acid sequence of the VL domain is SEQ ID No: 367. The VH domain may be combined with any of the heavy chain constant region sequences described herein (the nucleotide and corresponding amino acid sequences of which are set out in Table 2). The VL domain may be combined with any of the light chain constant region sequences described herein (the nucleotide and corresponding amino acid sequences of which are set out in Table 2).

[1658] Antibody IMPI-064 has a heavy chain variable region (VH) amino acid sequence of SEQ ID No: 353, comprising the CDRH1 amino acid sequence of SEQ ID No: 354 (IMGT), the CDRH2 amino acid sequence of SEQ ID No: 355 (IMGT), and the CDRH3 amino acid sequence of SEQ ID No: 356 (IMGT). The heavy chain nucleic acid sequence of the VH domain is SEQ ID No: 370. Antibody IMPI-064 has a light chain variable region (VL) amino acid sequence of SEQ ID No: 372, comprising the CDRL1 amino acid sequence of SEQ ID No: 364 (IMGT), the CDRL2 amino acid sequence of SEQ ID No: 157 (IMGT), and the CDRL3 amino acid sequence of SEQ ID No: 373 (IMGT). The light chain nucleic acid sequence of the VL domain is SEQ ID No: 371. The VH domain may be combined with any of the heavy chain constant region sequences described herein (the nucleotide and corresponding amino acid sequences of which are set out in Table 2). The VL domain may be combined with any of the light chain constant region sequences described herein (the nucleotide and corresponding amino acid sequences of which are set out in Table 2).

[1659] Antibody IMPI-065 has a heavy chain variable region (VH) amino acid sequence of SEQ ID No: 353, comprising the CDRH1 amino acid sequence of SEQ ID No: 354 (IMGT), the CDRH2 amino acid sequence of SEQ ID No: 355 (IMGT), and the CDRH3 amino acid sequence of SEQ ID No: 356 (IMGT). The heavy chain nucleic acid sequence of the VH domain is SEQ ID No: 352. Antibody IMPI-065 has a light chain variable region (VL) amino acid sequence of SEQ ID No: 375, comprising the CDRL1 amino acid sequence of SEQ ID No: 364 (IMGT), the CDRL2 amino acid sequence of SEQ ID No: 157 (IMGT), and the CDRL3 amino acid sequence of SEQ ID No: 376 (IMGT). The light chain nucleic acid sequence of the VL domain is SEQ ID No: 374. The VH domain may be combined with any of the heavy chain constant region sequences described herein (the nucleotide and corresponding amino acid sequences of which are set out in Table 2). The VL domain may be combined with any of the light chain constant region sequences described herein (the nucleotide and corresponding amino acid sequences of which are set out in Table 2).

[1660] Antibody IMPI-066 has a heavy chain variable region (VH) amino acid sequence of SEQ ID No: 378, comprising the CDRH1 amino acid sequence of SEQ ID No: 354 (IMGT), the CDRH2 amino acid sequence of SEQ ID No: 379 (IMGT), and the CDRH3 amino acid sequence of SEQ ID No: 356 (IMGT). The heavy chain nucleic acid sequence of the VH domain is SEQ ID No: 377. Antibody IMPI-066 has a light chain variable region (VL) amino acid sequence of SEQ ID No: 381, comprising the CDRL1 amino acid sequence of SEQ ID No: 382 (IMGT), the CDRL2 amino acid sequence of SEQ ID No: 157 (IMGT), and the CDRL3 amino acid sequence of SEQ ID No: 383 (IMGT). The light chain nucleic acid sequence of the VL domain is SEQ ID No: 380. The VH domain may be combined with any of the heavy chain constant region sequences described herein (the nucleotide and corresponding amino acid sequences of which are set out in Table 2). The VL domain may be combined with any of the light chain constant region sequences described herein (the nucleotide and corresponding amino acid sequences of which are set out in Table 2).

[1661] Antibody IMPI-067 has a heavy chain variable region (VH) amino acid sequence of SEQ ID No: 385, comprising the CDRH1 amino acid sequence of SEQ ID No: 386 (IMGT), the CDRH2 amino acid sequence of SEQ ID No: 387 (IMGT), and the CDRH3 amino acid sequence of SEQ ID No: 388 (IMGT). The heavy chain nucleic acid sequence of the VH domain is SEQ ID No: 384. Antibody IMPI-067 has a light chain variable region (VL) amino acid sequence of SEQ ID No: 390, comprising the CDRL1 amino acid sequence of SEQ ID No: 391 (IMGT), the CDRL2 amino acid sequence of SEQ ID No: 157 (IMGT), and the CDRL3 amino acid sequence of SEQ ID No: 392 (IMGT). The light chain nucleic acid sequence of the VL domain is SEQ ID No: 389. The VH domain may be combined with any of the heavy chain constant region sequences described herein (the nucleotide and corresponding amino acid sequences of which are set out in Table 2). The VL domain may be combined with any of the light chain constant region sequences described herein (the nucleotide and corresponding amino acid sequences of which are set out in Table 2).

[1662] Antibody IMPI-068 has a heavy chain variable region (VH) amino acid sequence of SEQ ID No: 394, comprising the CDRH1 amino acid sequence of SEQ ID No: 395 (IMGT), the CDRH2 amino acid sequence of SEQ ID No: 113 (IMGT), and the CDRH3 amino acid sequence of SEQ ID No: 396 (IMGT). The heavy chain nucleic acid sequence of the VH domain is SEQ ID No: 393. Antibody IMPI-068 has a light chain variable region (VL) amino acid sequence of SEQ ID No: 398, comprising the CDRL1 amino acid sequence of SEQ ID No: 37 (IMGT), the CDRL2 amino acid sequence of SEQ ID No: 28 (IMGT), and the CDRL3 amino acid sequence of SEQ ID No: 399 (IMGT). The light chain nucleic acid sequence of the VL domain is SEQ ID No: 397. The VH domain may be combined with any of the heavy chain constant region sequences described herein (the nucleotide and corresponding amino acid sequences of which are set out in Table 2). The VL domain may be combined with any of the light chain constant region sequences described herein (the nucleotide and corresponding amino acid sequences of which are set out in Table 2).

[1663] Antibody IMPI-069 has a heavy chain variable region (VH) amino acid sequence of SEQ ID No: 401, comprising the CDRH1 amino acid sequence of SEQ ID No: 354 (IMGT), the CDRH2 amino acid sequence of SEQ ID No: 355 (IMGT), and the CDRH3 amino acid sequence of SEQ ID No: 356 (IMGT). The heavy chain nucleic acid sequence of the VH domain is SEQ ID No: 400. Antibody IMPI-069 has a light chain variable region (VL) amino acid sequence of SEQ ID No: 403, comprising the CDRL1 amino acid sequence of SEQ ID No: 404 (IMGT), the CDRL2 amino acid sequence of SEQ ID No: 157 (IMGT), and the CDRL3 amino acid sequence of SEQ ID No: 360 (IMGT). The light chain nucleic acid sequence of the VL domain is SEQ ID No: 402. The VH domain may be combined with any of the heavy chain constant region sequences described herein (the nucleotide and corresponding amino acid sequences of which are set out in Table 2). The VL domain may be combined with any of the light chain constant region sequences described herein (the nucleotide and corresponding amino acid sequences of which are set out in Table 2).

[1664] Antibody IMPI-070 has a heavy chain variable region (VH) amino acid sequence of SEQ ID No: 353, comprising the CDRH1 amino acid sequence of SEQ ID No: 354 (IMGT), the CDRH2 amino acid sequence of SEQ ID No: 355 (IMGT), and the CDRH3 amino acid sequence of SEQ ID No: 356 (IMGT). The heavy chain nucleic acid sequence of the VH domain is SEQ ID No: 370. Antibody IMPI-070 has a light chain variable region (VL) amino acid sequence of SEQ ID No: 406, comprising the CDRL1 amino acid sequence of SEQ ID No: 407 (IMGT), the CDRL2 amino acid sequence of SEQ ID No: 157 (IMGT), and the CDRL3 amino acid sequence of SEQ ID No: 408 (IMGT). The light chain nucleic acid sequence of the VL domain is SEQ ID No: 405. The VH domain may be combined with any of the heavy chain constant region sequences described herein (the nucleotide and corresponding amino acid sequences of which are set out in Table 2). The VL domain may be combined with any of the light chain constant region sequences described herein (the nucleotide and corresponding amino acid sequences of which are set out in Table 2).

[1665] Antibody IMPI-071 has a heavy chain variable region (VH) amino acid sequence of SEQ ID No: 353, comprising the CDRH1 amino acid sequence of SEQ ID No: 354 (IMGT), the CDRH2 amino acid sequence of SEQ ID No: 355 (IMGT), and the CDRH3 amino acid sequence of SEQ ID No: 356 (IMGT). The heavy chain nucleic acid sequence of the VH domain is SEQ ID No: 370. Antibody IMPI-071 has a light chain variable region (VL) amino acid sequence of SEQ ID No: 410, comprising the CDRL1 amino acid sequence of SEQ ID No: 364 (IMGT), the CDRL2 amino acid sequence of SEQ ID No: 157 (IMGT), and the CDRL3 amino acid sequence of SEQ ID No: 360 (IMGT). The light chain nucleic acid sequence of the VL domain is SEQ ID No: 409. The VH domain may be combined with any of the heavy chain constant region sequences described herein (the nucleotide and corresponding amino acid sequences of which are set out in Table 2). The VL domain may be combined with any of the light chain constant region sequences described herein (the nucleotide and corresponding amino acid sequences of which are set out in Table 2).

[1666] Antibody IMPI-072 has a heavy chain variable region (VH) amino acid sequence of SEQ ID No: 412, comprising the CDRH1 amino acid sequence of SEQ ID No: 413 (IMGT), the CDRH2 amino acid sequence of SEQ ID No: 387 (IMGT), and the CDRH3 amino acid sequence of SEQ ID No: 388 (IMGT). The heavy chain nucleic acid sequence of the VH domain is SEQ ID No: 411. Antibody IMPI-072 has a light chain variable region (VL) amino acid sequence of SEQ ID No: 415, comprising the CDRL1 amino acid sequence of SEQ ID No: 391 (IMGT), the CDRL2 amino acid sequence of SEQ ID No: 157 (IMGT), and the CDRL3 amino acid sequence of SEQ ID No: 416 (IMGT). The light chain nucleic acid sequence of the VL domain is SEQ ID No: 414. The VH domain may be combined with any of the heavy chain constant region sequences described herein (the nucleotide and corresponding amino acid sequences of which are set out in Table 2). The VL domain may be combined with any of the light chain constant region sequences described herein (the nucleotide and corresponding amino acid sequences of which are set out in Table 2).

[1667] The sequences of YANG antibodies provided herein (particularly RBD-binders YANG-1401, YANG-1112, YANG-2107, YANG-2108, and YANG-2111; and S2-binders YANG-2203, YANG-2204, YANG-2205, YANG-2206, YANG-2207, and YANG-2208) are of particular interest in the present invention.

[1668] Antibody YANG-1401 has a heavy chain variable region (VH) amino acid sequence of SEQ ID No: 777, comprising the CDRH1 amino acid sequence of SEQ ID No: 778 (IMGT), the CDRH2 amino acid sequence of SEQ ID No: 779 (IMGT), and the CDRH3 amino acid sequence of SEQ ID No: 780 (IMGT). The heavy chain nucleic acid sequence of the VH domain is SEQ ID No: 776. Antibody YANG-1401 has a light chain variable region (VL) amino acid sequence of SEQ ID No: 782, comprising the CDRL1 amino acid sequence of SEQ ID No: 783 (IMGT), the CDRL2 amino acid sequence of SEQ ID No: 18 (IMGT), and the CDRL3 amino acid sequence of SEQ ID No: 784 (IMGT). The light chain nucleic acid sequence of the VL domain is SEQ ID No: 781. The VH domain may be combined with any of the heavy chain constant region sequences described herein (the nucleotide and corresponding amino acid sequences of which are set out in Table 2). The VL domain may be combined with any of the light chain constant region sequences described herein (the nucleotide and corresponding amino acid sequences of which are set out in Table 2).

[1669] Antibody YANG-1112 has a heavy chain variable region (VH) amino acid sequence of SEQ ID No: 571, comprising the CDRH1 amino acid sequence of SEQ ID No: 572 (IMGT), the CDRH2 amino acid sequence of SEQ ID No: 573 (IMGT), and the CDRH3 amino acid sequence of SEQ ID No: 574 (IMGT). The heavy chain nucleic acid sequence of the VH domain is SEQ ID No: 570. Antibody YANG-1112 has a light chain variable region (VL) amino acid sequence of SEQ ID No: 576, comprising the CDRL1 amino acid sequence of SEQ ID No: 577 (IMGT), the CDRL2 amino acid sequence of SEQ ID No: 578 (IMGT), and the CDRL3 amino acid sequence of SEQ ID No: 579 (IMGT). The light chain nucleic acid sequence of the VL domain is SEQ ID No: 575. The VH domain may be combined with any of the heavy chain constant region sequences described herein (the nucleotide and corresponding amino acid sequences of which are set out in Table 2). The VL domain may be combined with any of the light chain constant region sequences described herein (the nucleotide and corresponding amino acid sequences of which are set out in Table 2).

[1670] Antibody YANG-2107 has a heavy chain variable region (VH) amino acid sequence of SEQ ID No: 898, comprising the CDRH1 amino acid sequence of SEQ ID No: 899 (IMGT), the CDRH2 amino acid sequence of SEQ ID No: 900 (IMGT), and the CDRH3 amino acid sequence of SEQ ID No: 901 (IMGT). The heavy chain nucleic acid sequence of the VH domain is SEQ ID No: 897. Antibody YANG-2107 has a light chain variable region (VL) amino acid sequence of SEQ ID No: 903, comprising the CDRL1 amino acid sequence of SEQ ID No: 904 (IMGT), the CDRL2 amino acid sequence of SEQ ID No: 203 (IMGT), and the CDRL3 amino acid sequence of SEQ ID No: 905 (IMGT). The light chain nucleic acid sequence of the VL domain is SEQ ID No: 902. The VH domain may be combined with any of the heavy chain constant region sequences described herein (the nucleotide and corresponding amino acid sequences of which are set out in Table 2). The VL domain may be combined with any of the light chain constant region sequences described herein (the nucleotide and corresponding amino acid sequences of which are set out in Table 2).

[1671] Antibody YANG-2108 has a heavy chain variable region (VH) amino acid sequence of SEQ ID No: 907, comprising the CDRH1 amino acid sequence of SEQ ID No: 908 (IMGT), the CDRH2 amino acid sequence of SEQ ID No: 909 (IMGT), and the CDRH3 amino acid sequence of SEQ ID No: 910 (IMGT). The heavy chain nucleic acid sequence of the VH domain is SEQ ID No: 906. Antibody YANG-2108 has a light chain variable region (VL) amino acid sequence of SEQ ID No: 912, comprising the CDRL1 amino acid sequence of SEQ ID No: 913 (IMGT), the CDRL2 amino acid sequence of SEQ ID No: 203 (IMGT), and the CDRL3 amino acid sequence of SEQ ID No: 914 (IMGT). The light chain nucleic acid sequence of the VL domain is SEQ ID No: 911. The VH domain may be combined with any of the heavy chain constant region sequences described herein (the nucleotide and corresponding amino acid sequences of which are set out in Table 2). The VL domain may be combined with any of the light chain constant region sequences described herein (the nucleotide and corresponding amino acid sequences of which are set out in Table 2). Antibody YANG-2111 has a heavy chain variable region (VH) amino acid sequence of SEQ ID No: 1045, comprising the CDRH1 amino acid sequence of SEQ ID No: 1046 (IMGT), the CDRH2 amino acid sequence of SEQ ID No: 1047 (IMGT), and the CDRH3 amino acid sequence of SEQ ID No: 1048 (IMGT). The heavy chain nucleic acid sequence of the VH domain is SEQ ID No: 1044. Antibody YANG-2111 has a light chain variable region (VL) amino acid sequence of SEQ ID No: 1050, comprising the CDRL1 amino acid sequence of SEQ ID No: 1051 (IMGT), the CDRL2 amino acid sequence of SEQ ID No: 1052 (IMGT), and the CDRL3 amino acid sequence of SEQ ID No: 1053 (IMGT). The light chain nucleic acid sequence of the VL domain is SEQ ID No: 1049. The VH domain may be combined with any of the heavy chain constant region sequences described herein (the nucleotide and corresponding amino acid sequences of which are set out in Table 2). The VL domain may be combined with any ofthe light chain constant region sequences described herein (the nucleotide and corresponding amino acid sequences of which are set out in Table 2).

[1672] Antibody YANG-2203 has a heavy chain variable region (VH) amino acid sequence of SEQ ID No: 1105, comprising the CDRH1 amino acid sequence of SEQ ID No: 1106 (IMGT), the CDRH2 amino acid sequence of SEQ ID No: 1107 (IMGT), and the CDRH3 amino acid sequence of SEQ ID No: 1108 (IMGT). The heavy chain nucleic acid sequence of the VH domain is SEQ ID No: 1104. Antibody YANG-2203 has a light chain variable region (VL) amino acid sequence of SEQ ID No: 1110, comprising the CDRL1 amino acid sequence of SEQ ID No: 1111 (IMGT), the CDRL2 amino acid sequence of SEQ ID No: 1112 (IMGT), and the CDRL3 amino acid sequence of SEQ ID No: 1113 (IMGT). The light chain nucleic acid sequence of the VL domain is SEQ ID No: 1109. The VH domain may be combined with any of the heavy chain constant region sequences described herein (the nucleotide and corresponding amino acid sequences of which are set out in Table 2). The VL domain may be combined with any ofthe light chain constant region sequences described herein (the nucleotide and corresponding amino acid sequences of which are set out in Table 2).

[1673] Antibody YANG-2204 has a heavy chain variable region (VH) amino acid sequence of SEQ ID No: 1225, comprising the CDRH1 amino acid sequence of SEQ ID No: 1226 (IMGT), the CDRH2 amino acid sequence of SEQ ID No: 1227 (IMGT), and the CDRH3 amino acid sequence of SEQ ID No: 1228 (IMGT). The heavy chain nucleic acid sequence of the VH domain is SEQ ID No: 1224. Antibody YANG-2204 has a light chain variable region (VL) amino acid sequence of SEQ ID No: 1230, comprising the CDRL1 amino acid sequence of SEQ ID No: 1231 (IMGT), the CDRL2 amino acid sequence of SEQ ID No: 1232 (IMGT), and the CDRL3 amino acid sequence of SEQ ID No: 1233 (IMGT). The light chain nucleic acid sequence of the VL domain is SEQ ID No: 1229. The VH domain may be combined with any of the heavy chain constant region sequences described herein (the nucleotide and corresponding amino acid sequences of which are set out in Table 2). The VL domain may be combined with any ofthe light chain constant region sequences described herein (the nucleotide and corresponding amino acid sequences of which are set out in Table 2).

[1674] Antibody YANG-2205 has a heavy chain variable region (VH) amino acid sequence of SEQ ID No: 1235, comprising the CDRH1 amino acid sequence of SEQ ID No: 1236 (IMGT), the CDRH2 amino acid sequence of SEQ ID No: 1237 (IMGT), and the CDRH3 amino acid sequence of SEQ ID No: 1238 (IMGT). The heavy chain nucleic acid sequence of the VH domain is SEQ ID No: 1234. Antibody YANG-2205 has a light chain variable region (VL) amino acid sequence of SEQ ID No: 1240, comprising the CDRL1 amino acid sequence of SEQ ID No: 1241 (IMGT), the CDRL2 amino acid sequence of SEQ ID No: 1242 (IMGT), and the CDRL3 amino acid sequence of SEQ ID No: 1243 (IMGT). The light chain nucleic acid sequence of the VL domain is SEQ ID No: 1239. The VH domain may be combined with any of the heavy chain constant region sequences described herein (the nucleotide and corresponding amino acid sequences of which are set out in Table 2). The VL domain may be combined with any ofthe light chain constant region sequences described herein (the nucleotide and corresponding amino acid sequences of which are set out in Table 2).

[1675] Antibody YANG-2206 has a heavy chain variable region (VH) amino acid sequence of SEQ ID No: 1245, comprising the CDRH1 amino acid sequence of SEQ ID No: 1246 (IMGT), the CDRH2 amino acid sequence of SEQ ID No: 1247 (IMGT), and the CDRH3 amino acid sequence of SEQ ID No: 1248 (IMGT). The heavy chain nucleic acid sequence of the VH domain is SEQ ID No: 1244. Antibody YANG-2206 has a light chain variable region (VL) amino acid sequence of SEQ ID No: 1250, comprising the CDRL1 amino acid sequence of SEQ ID No: 1251 (IMGT), the CDRL2 amino acid sequence of SEQ ID No: 1252 (IMGT), and the CDRL3 amino acid sequence of SEQ ID No: 1253 (IMGT). The light chain nucleic acid sequence of the VL domain is SEQ ID No: 1249. The VH domain may be combined with any of the heavy chain constant region sequences described herein (the nucleotide and corresponding amino acid sequences of which are set out in Table 2). The VL domain may be combined with any ofthe light chain constant region sequences described herein (the nucleotide and corresponding amino acid sequences of which are set out in Table 2).

[1676] Antibody YANG-2207 has a heavy chain variable region (VH) amino acid sequence of SEQ ID No: 1255, comprising the CDRH1 amino acid sequence of SEQ ID No: 1256 (IMGT), the CDRH2 amino acid sequence of SEQ ID No: 1257 (IMGT), and the CDRH3 amino acid sequence of SEQ ID No: 1258 (IMGT). The heavy chain nucleic acid sequence of the VH domain is SEQ ID No: 1254. Antibody YANG-2207 has a light chain variable region (VL) amino acid sequence of SEQ ID No: 1260, comprising the CDRL1 amino acid sequence of SEQ ID No: 1261 (IMGT), the CDRL2 amino acid sequence of SEQ ID No: 1262 (IMGT), and the CDRL3 amino acid sequence of SEQ ID No: 1263 (IMGT). The light chain nucleic acid sequence of the VL domain is SEQ ID No: 1259. The VH domain may be combined with any of the heavy chain constant region sequences described herein (the nucleotide and corresponding amino acid sequences of which are set out in Table 2). The VL domain may be combined with any ofthe light chain constant region sequences described herein (the nucleotide and corresponding amino acid sequences of which are set out in Table 2).

[1677] Antibody YANG-2208 has a heavy chain variable region (VH) amino acid sequence of SEQ ID No: 1265, comprising the CDRH1 amino acid sequence of SEQ ID No: 1266 (IMGT), the CDRH2 amino acid sequence of SEQ ID No: 1267 (IMGT), and the CDRH3 amino acid sequence of SEQ ID No: 1268 (IMGT). The heavy chain nucleic acid sequence of the VH domain is SEQ ID No: 1264. Antibody YANG-2208 has a light chain variable region (VL) amino acid sequence of SEQ ID No: 1270, comprising the CDRL1 amino acid sequence of SEQ ID No: 1271 (IMGT), the CDRL2 amino acid sequence of SEQ ID No: 1272 (IMGT), and the CDRL3 amino acid sequence of SEQ ID No: 1273 (IMGT). The light chain nucleic acid sequence of the VL domain is SEQ ID No: 1269. The VH domain may be combined with any of the heavy chain constant region sequences described herein (the nucleotide and corresponding amino acid sequences of which are set out in Table 2). The VL domain may be combined with any ofthe light chain constant region sequences described herein (the nucleotide and corresponding amino acid sequences of which are set out in Table 2).

### CDRS, VL/VH:

[1678] In some examples the antibody comprises a variable heavy (VH) domain sequence comprising complementarity determining regions (CDRs) HCDR1, HCDR2 and HCDR3, and a variable light (VL) domain sequence comprising complementarity determining regions LCDR1, LCDR2 and LCDR3, wherein the HCDR3 is the HCDR3 of any one of the antibodies described herein and set out in Table 1 (Table 1a and/or Table 1b).

[1679] In some examples, the antibody comprises a variable heavy (VH) domain sequence comprising complementarity determining regions (CDRs) HCDR1, HCDR2, and HCDR3, and a variable light (VL) domain sequence comprising complementarity determining regions LCDR1, LCDR2 and LCDR3, wherein the CDRs are those of any one of the antibodies described herein and set out in Table 1 (Table 1a and/or Table 1b).

[1680] In some examples, the antibody comprises a variable heavy (VH) domain sequence and a variable light (VL) domain sequence and wherein the variable heavy (VH) domain and variable light (VL) domain sequences respectively comprise the variable heavy (VH) domain and variable light (VL) domain sequences of any one of the antibodies described herein and set out in Table 1 (Table 1a and/or Table 1b), optionally with 1, 2, 3, 4 or 5 amino acid alterations outside the complementarity determining regions (CDRs) in the variable heavy (VH) domain sequence and optionally with 1, 2, 3, 4 or 5 amino acid alterations outside the complementarity determining regions (CDRs) in the variable light (VL) domain sequence.

[1681] In some examples, the antibody comprises a variable heavy (VH) domain sequence and a variable light (VL) domain sequence and wherein the variable heavy (VH) domain and variable light (VL) domain sequences respectively comprise a sequence having at least 90% (preferably 95%, more preferably 98%) identity to the variable heavy (VH) and variable light (VL) domain sequences of any one of the antibodies described herein and set out in Table 1 (Table 1a and/or Table 1b), provided thatthe antibody has the CDRS of said antibody described herein and set out in Table 1 (Table 1a and/or Table 1b).

[1682] In work underlying the present invention, antibody sequences were recovered from antigen-binding B cells or from plasma cells from immunised mice as described elsewhere herein, and grouped into the clusters shown in FIGS. 3 and FIGS. 15 to 26 using bioinformatics analysis. It will be understood that antibodies in the same cluster (FIG. 3 and FIGS. 15 to 26) share a degree of sequence identity and/or conserved sequences. As such, antibodies in the same cluster might be considered as ‘sibling antibodies’. Sibling antibodies are within the scope of the present invention. In one embodiment, the present invention provides an expanded group of antibodies consisting of any antibody disclosed herein together with its sibling antibodies. In one embodiment, the present invention provides an expanded group of antibodies consisting of any group of antibodies disclosed herein together with their sibling antibodies. The present invention also provides antibodies having at least 90% (preferably 95%, more preferably 98%) identity to the variable heavy (VH) and variable light (VL) domain sequences of any one of the antibodies described herein and set out in Table 1 (Table 1a and/or Table 1b), provided that any substitutions in the VH and VL domain sequences are to amino acid residues present in a sibling antibody in the same cluster disclosed herein. The present invention also provides antibodies comprising a variable heavy (VH) domain sequence and a variable light (VL) domain sequence and wherein the variable heavy (VH) domain and variable light (VL) domain sequences respectively comprise the variable heavy (VH) domain and variable light (VL) domain sequences of any one of the antibodies described herein and set out in Table 1 (Table 1a and/or Table 1b), optionally with 1, 2, 3, 4 or 5 amino acid substitutions in the variable heavy (VH) domain sequence and optionally with 1, 2, 3, 4 or 5 amino acid substitutions in the variable light (VL) domain sequence, provided that any substitutions in the VH and VL domain sequences are to amino acid residues present in a sibling antibody in the same cluster disclosed herein.

[1683] One or more substitutions may be introduced in an antibody VH or VL domain at a position at which a different residue is present in a sibling antibody as shown in the clusters of FIGS. 3 and 15 to 26 herein. Thus, for example, an antibody may comprise the VH and VL domain of an IMPI antibody or YANG antibody disclosed herein, with one or more substitutions in framework regions, where those one or more substitutions are at positions shown to be variable in the cluster (optionally, at positions that vary between siblings obtained from antigen-binding B cells in the cluster and/or siblings for which assay data are presented herein). For cluster 1, for example, IMGT position 67 is variable since either Tyr or Asn may be present. Optionally, the substituted residue is the amino acid residue present in the sibling sequence (preferably, the sequence of a sibling obtained from an antigen-binding B cell or a sibling for which assay data are presented herein). Thus, a Y67N mutation may be introduced in a cluster 1 antibody, reflecting the residue present in IMPI-043. Conversely, N67Y mutation may be introduced in the VH domain of IMPI-043, reflecting the residue present in the other siblings of this cluster. As noted, siblings which were recovered from plasma cells (i.e., not recovered via antigen-binding of their expressing B cell) and for which assay data are not shown herein may optionally be discounted for this analysis. After subtracting such siblings from the clusters, the remaining siblings in each cluster are:
[1684] Cluster 1: IMPI-016, IMPI-024, IMPI-026, IMPI-034, IMPI-043, IMPI-050, IMPI-051, IMPI-058
[1685] Cluster 2: IMPI-001, IMPI-007, IMPI-019, IMPI-020, IMPI-023, IMPI-025, IMPI-030, IMPI-032, IMPI-039, IMPI-040, IMPI-053
[1686] Cluster 3: IMPI-014, IMPI-018, IMPI-027, IMPI-033, IMPI-045, IMPI-048
[1687] Cluster 4: IMPI-008, IMPI-010, IMPI-022, IMPI-035
[1688] Cluster 5: IMPI-005, IMPI-029, IMPI-056
[1689] Cluster 6: IMPI-002, IMPI-052
[1690] Cluster 7: IMPI-041, IMPI-055
[1691] Cluster 8: IMPI-003, IMPI-013
[1692] Cluster 9: IMPI-042, IMPI-054
[1693] Cluster 10: IMPI-021, IMPI-060
[1694] Cluster 11: IMPI-061, IMPI-062, IMPI-063, IMPI-064, IMPI-065, IMPI-066, IMPI-069, IMPI-070, IMPI-071
[1695] Cluster 12: IMPI-067
[1696] Cluster 13: YANG-1401, YANG-1401a, YANG-1401b, YANG-1401c, YANG-1401d, YANG-1401e
[1697] Cluster 14: YANG 2107, YANG-2108, YANG-2108a, YANG-2108b, YANG-2108c, YANG-2108d,
[1698] YANG-2108e, YANG-2108f, YANG-2108g, YANG-2108h, YANG-2108i, YANG-2108j, YANG-2108k, YANG-21081
[1699] Cluster 15: YANG-2111, YANG-2111a, YANG-2111b
[1700] Cluster 16: YANG-2203, YANG-2203a, YANG-2203b, YANG-2203c, YANG-2203d, YANG-2203e, YANG-2203f, YANG-2203g, YANG-2203h, YANG-2203i, YANG-2203j, YANG-2203k.
[1701] Cluster 17: YANG-2204, YANG-2205, YANG-2206, YANG-2207, YANG-2208, YANG-2209, YANG-2210, YANG-2211, YANG-2212, YANG-2213, YANG-2214, YANG-2215, YANG-2216, YANG-2217, YANG-2218, YANG-2219, YANG-2220, YANG-2221, YANG-2222, YANG-2223, YANG-2224, YANG-2225, YANG-2226, YANG-2227, YANG-2228, YANG-2229, YANG-2230, YANG-2231, YANG-2232, YANG-2233, YANG-2234, YANG-2235, YANG-2236, YANG-2237, YANG-2238, YANG-2239, YANG-2240, YANG-2241, YANG-2242, YANG-2243, YANG-2244, YANG-2245, YANG-2246, YANG-2247, YANG-2248, YANG-2249, YANG-2250, YANG-2251, YANG-2252, YANG-2253, YANG-2254, YANG-2255, YANG-2256, YANG-2257, YANG-2258, YANG-2259, YANG-2260, YANG-2261, YANG-2262, YANG-2263, YANG-2264, YANG-2265, YANG-2266, YANG-2267, YANG-2268, YANG-2269, YANG-2270, YANG-2271, YANG-2272, YANG-2273, YANG-2274, YANG-2275, YANG-2276, YANG-2277, YANG-2278, YANG-2279, YANG-2280, YANG-2281, YANG-2282, YANG-2283, YANG-2284, YANG-2285, YANG-2286, YANG-2287, YANG-2288, YANG-2289, YANG-2290, YANG-2291, YANG-2292, YANG-2293, YANG-2294, YANG-2295, YANG-2296, YANG-2297, YANG-2298, YANG-2299, YANG-2299a, YANG-2299b, YANG-2299c, YANG-2299d, YANG-2299e, YANG-2299f, YANG-2299g, YANG-2299h, YANG-2299i, YANG-2299j, YANG-2299k, YANG-22991
[1702] Cluster 18: YANG-1112, YANG-1112a, YANG-1112b, YANG-1112c

[1703] When one or more mutations (whether additions, insertions, substitutions or deletions of one or more amino acids) are made in the variable domain sequence of an antibody described herein, whether in a CDR or framework region, the resulting antibody may be tested (e.g., in one or more assays described herein) to confirm that affinity and/or potency are retained.

[1704] In some examples, the antibody comprises a variable heavy (VH) domain sequence and a variable light (VL) domain sequence and wherein the variable heavy (VH) domain and variable light (VL) domain sequences respectively comprise the variable heavy (VH) and variable light (VL) domain sequences of any one of the antibodies described herein and set out in Table 1 (Table 1a and/or Table 1b).

### Gene Segments:

[1705] In some aspects, the antibody comprises VH and/or VL domain and framework regions of human germline gene segment sequences. Gene segment sequences from which the exemplary antibodies described herein are derived are set out in Table 3.

[1706] In one example, the antibody comprises an antibody VH domain which is derived from recombination of a human heavy chain V gene segment, a human heavy chain D gene segment and a human heavy chain J gene segment.

[1707] In one example, the antibody comprises an antibody VH domain which is derived from recombination of a human heavy chain V gene segment, a human heavy chain D gene segment and a human heavy chain J gene segment, wherein the V gene segment is IGHV3-53*01, IGHV1-8*01 or IGHV3-33*01; and/or the J gene segment is IGHJ6*02, IGHJ4*02 or IGHJ3*02. In one example, the antibody comprises framework regions FR1, FR2, FR3 and FR4, wherein FR1 aligns with human germline V gene segment IGHV3-53*01, IGHV1-8*01 or IGHV3-33*01 with up to 1, 2, 3, 4, or 5 amino acid alterations, FR2 aligns with human germline V gene segment IGHV3-53*01, IGHV1-8*01 or IGHV3-33*01 with up to 1, 2, 3, 4, or 5 amino acid alterations, FR3 aligns with human germline V gene segment IGHV3-53*01, IGHV1-8*01 or IGHV3-33*01 with up to 1, 2, 3, 4 or 5 amino acid alterations, and/or FR4 aligns with human germline J gene segment IGHJ6*02, IGHJ4*02 or IGHJ3*02 with up to 1, 2, 3, 4 or 5 amino acid alterations.

[1708] In one example, the antibody comprises an antibody VH domain which is derived from recombination of a human heavy chain V gene segment, a human heavy chain D gene segment and a human heavy chain J gene segment, wherein the V gene segment is IGHV4-4*02, IGHV3-9*01 or IGHV3-30*18; and/or the J gene segment is IGHJ4*02 or IGHJ6*02. In one example, the antibody comprises framework regions FR1, FR2, FR3 and FR4, wherein FR1 aligns with human germline V gene segment IGHV4-4*02, IGHV3-9*01 or IGHV3-30*18 with up to 1, 2, 3, 4, or 5 amino acid alterations, FR2 aligns with human germline V gene segment IGHV4-4*02, IGHV3-9*01 or IGHV3-30*18 with up to 1, 2, 3, 4, or 5 amino acid alterations, FR3 aligns with human germline V gene segment IGHV4-4*02, IGHV3-9*01 or IGHV3-30*18 with up to 1, 2, 3, 4 or 5 amino acid alterations, and/or FR4 aligns with human germline J gene segment IGHJ4*02 or IGHJ6*02 with up to 1, 2, 3, 4 or 5 amino acid alterations.

[1709] In one example, the antibody comprises an antibody VH domain which is derived from recombination of a human heavy chain V gene segment, a human heavy chain D gene segment and a human heavy chain J gene segment, wherein the V gene segment is IGHV3-9*01 or IGHV3-20*d01; and/or the J gene segment is IGHJ6*02 or IGHJ4*02. In one example, the antibody comprises framework regions FR1, FR2, FR3 and FR4, wherein FR1 aligns with human germline V gene segment IGHV3-9*01 or IGHV3-20*d01 with up to 1, 2, 3, 4, or 5 amino acid alterations, FR2 aligns with human germline V gene segment IGHV3-9*01 or IGHV3-20*d01 with up to 1, 2, 3, 4, or 5 amino acid alterations, FR3 aligns with human germline V gene segment IGHV3-9*01 or IGHV3-20*d01 with up to 1, 2, 3, 4 or 5 amino acid alterations, and/or FR4 aligns with human germline J gene segment IGHJ6*02 or IGHJ4*02 with up to 1, 2, 3, 4 or 5 amino acid alterations.

[1710] In one example, the antibody comprises an antibody VH domain which is derived from recombination of a human heavy chain V gene segment, a human heavy chain D gene segment and a human heavy chain J gene segment, wherein the V gene segment is IGHV5-51*01, IGHV4-31*03, IGHV3-53*01 or IGHV3-30*18; and/or the J gene segment is IGHJ4*02 or IGHJ6*02. In one example, the antibody comprises framework regions FR1, FR2, FR3 and FR4, wherein FR1 aligns with human germline V gene segment IGHV5-51*01, IGHV4-31*03, IGHV3-53*01 or IGHV3-30*18 with up to 1, 2, 3, 4, or 5 amino acid alterations, FR2 aligns with human germline V gene segment IGHV5-51*01, IGHV4-31*03, IGHV3-53*01 or IGHV3-30*18 with up to 1, 2, 3, 4, or 5 amino acid alterations, FR3 aligns with human germline V gene segment IGHV5-51*01, IGHV4-31*03, IGHV3-53*01 or IGHV3-30*18 with up to 1, 2, 3, 4 or 5 amino acid alterations, and/or FR4 aligns with human germline J gene segment IGHJ4*02 or IGHJ6*02 with up to 1, 2, 3, 4 or 5 amino acid alterations.

[1711] In one example, the antibody comprises an antibody VL domain which is derived from recombination of a human light chain V gene segment and a human light chain J gene segment.

[1712] In one example, the antibody comprises an antibody VL domain which is derived from recombination of a human light chain V gene segment and a human light chain J gene segment, wherein the V gene segment is IGKV1-9*d01, IGKV6-21*01, IGKV1-33*01 orIGKV3-20*01, and/or the Jgene segment is IGKJ5*01, IGKJ4*01, IGKJ3*01, IGKJ2*04 or IGKJ1*01. In one example, the antibody comprises framework regions FR1, FR2, FR3 and FR4, wherein FR1 aligns with human germline V gene segment IGKV1-9*d01, IGKV6-21*01, IGKV1-33*01 or IGKV3-20*01 with up to 1, 2, 3, 4, or 5 amino acid alterations, FR2 aligns with human germline V gene segment IGKV1-9*d01, IGKV6-21*01, IGKV1-33*01 or IGKV3-20*01 with up to 1, 2, 3, 4, or 5 amino acid alterations, FR3 aligns with human germline V gene segment IGKV1-9*d01, IGKV6-21*01, IGKV1-33*01 or IGKV3-20*01 with up to 1, 2, 3, 4 or 5 amino acid alterations, and/or FR4 aligns with human germline J gene segment IGKJ5*01, IGKJ4*01, IGKJ3*01, IGKJ2*04 or IGKJ1*01 with up to 1, 2, 3, 4 or 5 amino acid alterations.

[1713] In one example, the antibody comprises an antibody VL domain which is derived from recombination of a human light chain V gene segment and a human light chain J gene segment, wherein the V gene segment is IGKV2D-30*01, IGKV1D-13*d01 or IGKV3-20*01, and/or the J gene segment is IGKJ4*01. In one example, the antibody comprises framework regions FR1, FR2, FR3 and FR4, wherein FR1 aligns with human germline V gene segment IGKV2D-30*01, IGKV1D-13*d01 or IGKV3-20*01 with up to 1, 2, 3, 4, or 5 amino acid alterations, FR2 aligns with human germline V gene segment IGKV2D-30*01, IGKV1D-13*d01 or IGKV3-20*01 with up to 1, 2, 3, 4, or 5 amino acid alterations, FR3 aligns with human germline V gene segment IGKV2D-30*01, IGKV1D-13*d01 or IGKV3-20*01 with up to 1, 2, 3, 4 or 5 amino acid alterations, and/or FR4 aligns with human germline J gene segment IGKJ4*01 with up to 1, 2, 3, 4 or 5 amino acid alterations.

[1714] In one example, the antibody comprises an antibody VL domain which is derived from recombination of a human light chain V gene segment and a human light chain J gene segment, wherein the V gene segment is IGKV1-6*01 or IGKV3-20*01, and/or the J gene segment is IGKJ1*01 or IGKJ2*04. In one example, the antibody comprises framework regions FR1, FR2, FR3 and FR4, wherein FR1 aligns with human germline V gene segment IGKV1-6*01 or IGKV3-20*01 with up to 1, 2, 3, 4, or 5 amino acid alterations, FR2 aligns with human germline V gene segment IGKV1-6*01 or IGKV3-20*01 with up to 1, 2, 3, 4, or 5 amino acid alterations, FR3 aligns with human germline V gene segment IGKV1-6*01 or IGKV3-20*01 with up to 1, 2, 3, 4 or 5 amino acid alterations, and/or FR4 aligns with human germline J gene segment IGKJ1*01 or IGKJ2*04 with up to 1, 2, 3, 4 or 5 amino acid alterations.

[1715] In one example, the antibody comprises an antibody VL domain which is derived from recombination of a human light chain V gene segment and a human light chain J gene segment, wherein the V gene segment is IGKV1D-13*d01, IGKV3-20*01 or IGKV1-12*01, and/or the J gene segment is IGKJ1*01, IGKJ4*01 or IGKJ3*01. In one example, the antibody comprises framework regions FR1, FR2, FR3 and FR4, wherein FR1 aligns with human germline V gene segment IGKV1D-13*d01, IGKV3-20*01 or IGKV1-12*01 with up to 1, 2, 3, 4, or 5 amino acid alterations, FR2 aligns with human germline V gene segment IGKV1D-13*d01, IGKV3-20*01 or IGKV1-12*01 with up to 1, 2, 3, 4, or 5 amino acid alterations, FR3 aligns with human germline V gene segment IGKV1D-13*d01, IGKV3-20*01 or IGKV1-12*01 with up to 1, 2, 3, 4 or 5 amino acid alterations, and/or FR4 aligns with human germline J gene segment IGKJ1*01, IGKJ4*01 or IGKJ3*01 with up to 1, 2, 3, 4 or 5 amino acid alterations.

### Antibody Properties:

[1716] In some examples, the antibody is a monoclonal antibody. Methods of making monoclonal antibodies are known and include, for example, fusing myeloma cells with the cells from an animal that was immunized with the desired antigen. In other examples, the monoclonal antibodies may be generated using recombinant DNA technology. In one example, the antibody is a monoclonal antibody that specifically binds the SARS-CoV-2 spike protein. In one example, the antibody is a fully human monoclonal antibody.

[1717] In some examples, the antibody is a human antibody. In one example, the antibody is a fully human antibody. In one example, the antibody is a fully human monoclonal antibody.

### Sequence Identity:

[1718] In some examples, the antibody comprises an amino acid sequence which has a high level of sequence identity to the amino acid sequence of one of the exemplary antibodies described herein and set out in Table 1 (Table 1a and/or Table 1b).

[1719] In one example, the amino acid sequence is at least 70% identical to the specified SEQ ID No. In one example, the amino acid sequence is at least 75% identical to the specified SEQ ID No. In one example, the amino acid sequence is at least 95% identical to the specified SEQ ID No. In one example, the amino acid sequence is at least 96% identical to the specified SEQ ID No. In one example, the amino acid sequence is at least 97% identical to the specified SEQ ID No. In one example, the amino acid sequence is at least 98% identical to the specified SEQ ID No. In one example, the amino acid sequence is at least 99% identical to the specified SEQ ID No. In one example, the amino acid sequence is at least 99.5% identical to the specified SEQ ID No.

### Substitutions:

[1720] In some examples, the antibody comprises amino acid substitutions.

[1721] Amino acid substitutions include alterations in which an amino acid is replaced with a different naturally-occurring amino acid residue. Such substitutions may be classified as “conservative”, in which case an amino acid residue contained in a polypeptide is replaced with another naturally occurring amino acid of similar character either in relation to polarity, side chain functionality or size. Such conservative substitutions are well known in the art. Substitutions encompassed by the present invention may also be “non-conservative”, in which an amino acid residue which is present in a peptide is substituted with an amino acid having different properties, such as naturally-occurring amino acid from a different group (e.g. substituting a charged or hydrophobic amino; acid with alanine), or alternatively, in which a naturally-occurring amino acid is substituted with a non-conventional amino acid.

[1722] In one embodiment, the conservative amino acid substitutions are as described herein. For example, the substitution may be of Y with F, T with S or K, P with A, E with D or Q, N with D or G, R with K, G with N or A, T with S or K, D with N or E, I with L or V, F with Y, S with T or A, R with K, G with N or A, K with R, A with S, K or P. In another embodiment, the conservative amino acid substitutions may be wherein Y is substituted with F, T with A or S, I with L or V, W with Y, M with L, N with D, G with A, T with A or S, D with N, I with L or V, F with Y or L, S with A or T and A with S, G, T or V.

[1723] In one example, the amino acid substitutions are located outside the CDR sequences.

### Light Chains:

[1724] In some examples, the antibody comprises a kappa light chain. Kappa light chain constant region amino acid and nucleotide sequences are set out in SEQ ID Nos: 447-456.

[1725] In one example, the light chain may be a lambda light chain. Lambda light chain constant region amino acid and nucleotide sequences can be found in SEQ ID Nos: 457-481.

### Isotypes, Constant Regions+Modifications:

[1726] In some examples, the antibodies may block the progress of an infection at the point of viral entry into a cell, by binding to the virus and preventing it infecting the cell (neutralisation). The antibody may then further mediate uptake and destruction of the virus by immune cells (opsonisation). The antibody may further mediate the disruption of the virus lipid envelope by the fixation of complement. In other examples, the antibodies facilitate the killing of an infected cell via antibody dependent cellular cytotoxicity (ADCC), where antibodies bind to infected cells and allow immune cells to kill them. Selection of an appropriate format for the antibody (e.g., IgG4 or IgG1), can be used to achieve one or more of these outcomes.

[1727] Infection can in principle be prevented by high potency neutralising antibodies that bind with high affinity to the virus spike protein and prevent cell entry. The format for that antibody could be an antibody with limited Fc effector functions, e.g., an IgG4, e.g., a stabilised IgG4 isotype. Administration of an anti-IgG4 antibody in a prophylactic setting should give protective viral neutralising activity, however, repeated doses of the antibody may be required every 3-4 weeks to maintain protective efficacy and until the risk of infection has reduced. In a therapeutic setting such an antibody would also neutralise virus and reduce virus load thereby possibly impacting on disease severity.

[1728] The same potent spike binding antibody can alternatively be formatted to neutralise virus entry and target infected cells for killing by inclusion of a portion with Fc effector function, e.g., an IgG1 constant region.

[1729] An effector enabled antibody may recruit natural killer cells to infected cells to achieve ADCC, facilitate opsonisation of virus particles to allow engulfment and destruction by macrophages and/or target virus particles for complement deposition.

[1730] The antibodies described herein may comprise a constant region, such as a human constant region, for example an effector-null human constant region, e.g. an IgG4 constant region or an IgG1 constant region, optionally wherein the constant region is IgG4-PE (SEQ ID Nos: 441-446 and 482-483), or a disabled IgG1 as defined in SEQ ID Nos: 425-426.

[1731] In other embodiments, the antibody is any of the isotypes or constant regions as defined hereinabove. In one embodiment, the constant region is wild-type human IgG1 (SEQ ID Nos: 417-424). For example, the constant region is an effector-enabled IgG1 constant region, optionally having ADCC and/or CDC activity.

[1732] In one embodiment, the constant region is engineered for enhanced ADCC and/or CDC and/or ADCP. In another embodiment, the constant region is engineered for enhanced effector function.

[1733] In some embodiments, the antibody may comprise modifications that enhance the ability ofthe antibody to cluster and therefore be a better substrate for complement fixation. The Fc domain of IgG1 may be mutated for example at E345 or E430 to reinforce inter-antibody Fc:Fc interactions, stimulating formation of hexamers, which enhances the induction of CDC and ADCC of target cells (de Jong et al., PloS Biol 14(1) e1002344 2016). Hexamer formation is optionally combined with a bispecific antibody format.

[1734] The IgG4 constant region may be any of the IgG4 constant region amino acid sequences, or encoded by any of the nucleic acid sequences (SEQ ID Nos: 435-440). A heavy chain constant region may be an IgG4 comprising both the Leu235Glu mutation and the Ser228Pro mutation. This “IgG4-PE” heavy chain constant region (SEQ ID Nos: 441-446 and 482-483) is effector null.

[1735] An alternative effector null human constant region is a disabled IgG1 being an IgG1*01 allele comprising the L235A and/or G237A mutations (e.g. LAGA, SEQ ID Nos: 425-426). In one example, the antibodies or antibody fragments disclosed herein comprise an IgG1 heavy chain constant region, wherein the sequence contains alanine at position 235 and/or 237 (EU index numbering). The antibody-dependent cell phagocytosis (ADCP) mechanism is discussed in Gil et al., “Antibody-Dependent Phagocytosis of Tumor Cells by Macrophages: A Potent Effector Mechanism of Monoclonal Antibody Therapy of Cancer”, Cancer Res., 75(23), Dec. 1, 2015.

[1736] The potency of Fc-mediated effects may be enhanced by engineering the Fc domain by various established techniques. Such methods increase the affinity for certain Fc-receptors or decrease the affinity for inhibitory Fc-receptors, thus creating potential diverse profiles of activation enhancement. This can be achieved by modification of one or several amino acid residues (e.g. as described in Lazar et al., 2006, Proc. Natl. Acad. Sci. U.S.A., Mar 14; 103(11):4005-10; the modifications disclosed therein are incorporated herein by reference). Human IgG1 constant regions containing specific mutations or altered glycosylation on residue Asn297 (e.g. N297Q, EU index numbering) have been shown to enhance binding to certain Fc receptors.

[1737] In one example, such mutations are one or more of the residues selected from 239, 332 and 330 for human IgG1 constant regions (or the equivalent positions in other IgG isotypes). In one example, the antibody or fragment comprises a human IgG1 constant region having one or more mutations independently selected from N297Q, S239D, 1332E and A330L (EU index numbering).

[1738] In another example, the increase in affinity for Fc-receptors is achieved by altering the natural glycosylation profile of the Fc domain by, for example, generating under fucosylated or de-fucosylated variants (as described in Natsume et al., 2009, Drug Des. Devel. Ther., 3:7-16 or by Zhou Q., Biotechnol. Bioeng., 2008, Feb 15, 99(3):652-65, the modifications described therein are incorporated herein by reference). Non-fucosylated antibodies harbour a tri-mannosyl core structure of complex-type N-glycans of Fc without fucose residue. These glycoengineered antibodies that lack core fucose residue from the Fc N-glycans may exhibit stronger ADCC than fucosylated equivalents due to enhancement of FcγRIIIa binding capacity. For example, to increase ADCC, residues in the hinge region can be altered to increase binding to Fc-yRIII (see, for example, Shields et al., 2001, J. Biol. Chem., Mar 2; 276(9):6591-604; the modifications described therein are incorporated herein by reference). Thus, in one example, the antibody or fragment comprises a human IgG heavy chain constant region that is a variant of a wild-type human IgG heavy chain constant region, wherein the variant human IgG heavy chain constant region binds to human Fcγ receptors selected from the group consisting of FcγRIIB and FcγRIIA with higher affinity than the wild type human IgG heavy chain constant region binds to the human Fcγ receptors. In one example, the antibody or fragment comprises a human IgG heavy chain constant region that is a variant of a wild type human IgG heavy chain constant region, wherein the variant human IgG heavy chain constant region binds to human FcγRIIB with higher affinity than the wild type human IgG heavy chain constant region binds to human FcγRIIB. In one example, the variant human IgG heavy chain constant region is a variant human IgG1, a variant human IgG2, or a variant human IgG4 heavy chain constant region. In one example, the variant human IgG heavy chain constant region comprises one or more amino acid mutations selected from G236D, P238D, S239D, S267E, L328F, and L328E (EU index numbering system). In another example the variant human IgG heavy chain constant region comprises a set of amino acid mutations selected from the group consisting of: S267E and L328F; P238D and L328E; P238D and one or more substitutions selected from the group consisting of E233D, G237D, H268D, P271G, and A330R; P238D, E233D, G237D, H268D, P271G, and A330R; G236D and S267E; S239D and S267E; V262E, S267E, and L328F; and V264E, S267E, and L328F (EU index numbering system). In another example, the variant human IgG heavy chain constant region further comprises one or more amino acid mutations that reduce the affinity of the IgG for human FcγRIIIA, human FcγRIIA, or human FcγRI. In one example, the FcγRIIB is expressed on a cell selected from the group consisting of macrophages, monocytes, B-cells, dendritic cells, endothelial cells, and activated T-cells. In one embodiment, the variant human IgG heavy chain constant region comprises one or more of the following amino acid mutations G236A, S239D, F243L, T256A, K290A, R292P, S298A, Y300L, V305I, A330L, 1332E, E333A, K334A, A339T, and P396L (EU index numbering system). In one example, the variant human IgG heavy chain constant region comprises a set of amino acid mutations selected from the group consisting of: S239D; T256A; K290A; S298A; 1332E; E333A; K334A; A339T; S239D and 1332E; S239D, A330L, and 1332E; S298A, E333A, and K334A; G236A, S239D, and 1332E; and F243L, R292P, Y300L, V305I, and P396L (EU index numbering system). In one example, the variant human IgG heavy chain constant region comprises a S239D, A330L, or 1332E amino acid mutations (EU index numbering system). In one example, the variant human IgG heavy chain constant region comprises an S239D and 1332E amino acid mutations (EU index numbering system). In one example, the variant human IgG heavy chain constant region is a variant human IgG1 heavy chain constant region comprising the S239D and 1332E amino acid mutations (EU index numbering system). In one example, the antibody or fragment comprises an afucosylated Fc region. In another example, the antibody or fragment thereof is defucosylated.

[1739] In another example, the antibody or fragment is under fucosylated.

[1740] In another example, the antibodies and fragments disclosed herein may comprise a triple mutation (M252Y/S254T/T256E) which enhances binding to FcRn. See Dall'Aqua et al., Immunol 2002; 169:5171-5180 for a discussion of mutations affection FcRn binding in table 2, the mutations described therein are incorporated herein by reference.

[1741] Equally, the enhancement of CDC may be achieved by amino acid changes that increase affinity for Clq, the first component of the classic complement activation cascade (see Idusogie et al., J. Immunol., 2001, 166:2571-2575; the modifications described are incorporated herein by reference). Another approach is to create a chimeric Fc domain created from human IgG1 and human IgG3 segments that exploit the higher affinity if IgG3 for Clq (Natsume et al., 2008, Cancer Res., 68: 3863-3872; the modifications are incorporated herein by reference). In another example, the antibody or antibody fragments disclosed herein may comprise mutated amino acids at residues 329, 331 and/or 322 to alter the Clq binding and/or reduced or abolished CDC activity. In another example, the antibodies or antibody fragments disclosed herein may contain Fc regions with modifications at residues 231 and 239, whereby the amino acids are replaced to alter the ability of the antibody to fix complement. In one example, the antibody or fragment has a constant region comprising one or more mutations selected from E345K, E430G, R344D and D356R, in particular a double mutation comprising R344D and D356R (EU index numbering system).

[1742] An antibody may have a heavy chain constant region that binds one or more types of Fc receptor but does not induce cellular effector functions, i.e. which does not mediate ADCC, CDC or ADCP activity. Such a constant region may be unable to bind the particular Fc receptor(s) responsible for triggering ADCC, CDC or ADCP activity. An antibody may have a heavy chain constant region that does not bind Fcγ receptors. Thus, in one example, the constant region may comprise a Leu235Glu mutation (EU index numbering system).

[1743] In another example, the antibodies disclosed herein are modified to increase or decrease serum half-life. In one embodiment, one or more of the following mutations: T252L, T254S or T256F are introduced to increase biological half-life of the antibody. Biological half-life can also be increased by altering the heavy chain constant region CH1 domain or CL region to contain a salvage receptor binding epitope taken from two loops of a CH2 domain of an Fc region of an IgG, as described in U.S. Pat. Nos. 5,869,046 and 6,121,022, the modifications described therein are incorporated herein by reference. In another example, the Fc hinge region of an antibody or antigen-binding fragment of the invention is mutated to decrease the biological half-life of the antibody or fragment. One or more amino acid mutations are introduced into the CH2-CH3 domain interface region of the Fc-hinge fragment such that the antibody or fragment has impaired Staphylococcyl protein A (SpA) binding relative to native Fc-hinge domain SpA binding. Other methods of increasing serum half-life are known to those skilled in the art. Thus, in one example, the antibody or fragment is PEGylated. In another example, the antibody or fragment is fused to an albumin-binding domain, e.g. an albumin binding single domain antibody (dAb). In another example, the antibody or fragment is PASylated (i.e. genetic fusion of polypeptide sequences composed of PAS (XL-Protein GmbH) which forms uncharged random coil structures with large hydrodynamic volume). In another example, the antibody or fragment is XTENylated®/rPEGylated (i.e. genetic fusion of non-exact repeat peptide sequence (Amunix, Versartis) to the therapeutic peptide). In another example, the antibody or fragment is ELPylated (i.e. genetic fusion to ELP repeat sequence (PhaseBio)). These various half-life extending fusions are described in more detail in Strohl, BioDrugs (2015) 29:215-239, which fusions are incorporated herein by reference.

[1744] The antibody may have a modified constant region which increases stability. Thus, in one example, the heavy chain constant region comprises a Ser228Pro mutation. In another example, the antibodies and fragments disclosed herein comprise a heavy chain hinge region that has been modified to alter the number of cysteine residues. This modification can be used to facilitate assembly of the light and heavy chains or to increase or decrease the stability of the antibody.

### Nucleic Acids, Vectors, Host Cells

[1745] Nucleic acids that encode a VH domain and/or a VL domain of any one of the antibodies described herein are also provided. The nucleic acid sequences encoding each of the VH and VL domains of each the exemplary antibodies described herein are set out in Tables 1a and 1b.

[1746] In one example, the nucleic acid sequence is at least 70% identical to the specified SEQ ID NO. In one example, the nucleic acid sequence is at least 80% identical to the specified SEQ ID NO. In one example, the nucleic acid sequence is at least 90% identical to the specified SEQ ID NO. In one example, the nucleic acid sequence is at least 95% identical to the specified SEQ ID NO. In one example, the nucleic acid sequence is at least 96% identical to the specified SEQ ID NO. In one example, the nucleic acid sequence is at least 97% identical to the specified SEQ ID NO. In one example, the nucleic acid sequence is at least 98% identical to the specified SEQ ID NO. In one example, the nucleic acid sequence is at least 99% identical to the specified SEQ ID NO. In one example, the nucleic acid sequence is at least 99.5% identical to the specified SEQ ID NO.

[1747] In one example, the nucleic acid encodes a heavy chain of any one of the antibodies described herein. In another example, the nucleic acid encodes a light chain of any one of the antibodies described herein.

[1748] In one example, the nucleic acid is an isolated and purified nucleic acid.

[1749] Vectors comprising the nucleic acids described above are also provided. In one example, the vector may be a CHO vector. In one example, the vector may be a HEK293 vector.

[1750] Host cells comprising the nucleic acids described above are also provided. In some examples, the host cells are eukaryotic cells, e.g., mammalian cells, preferably CHO cells (e.g., CHO cells grown in suspension culture).

### Pharmaceutical Composition

[1751] In one example, there is provided a pharmaceutical composition comprising an effective amount of an antibody as described herein and a pharmaceutically acceptable excipient. An effective amount of antibody to be employed therapeutically will depend, for example, upon the therapeutic objectives, the route of administration, and the condition of the patient. In one example, the composition includes other excipients or stabilizers.

[1752] Pharmaceutically acceptable excipients are known and include carriers, excipients, or stabilizers that are nontoxic to the cell or mammal being exposed thereto at the dosages and concentrations employed. Often the physiologically acceptable excipient is an aqueous pH buffered solution. Examples of physiologically acceptable excipient include buffers such as phosphate, citrate, and other organic acids; antioxidants including ascorbic acid; low molecular weight (less than about 10 residues) polypeptide; proteins, such as serum albumin, gelatin, or immunoglobulins; hydrophilic polymers such as polyvinylpyrrolidone; amino acids such as glycine, glutamine, asparagine, arginine or lysine; monosaccharides, disaccharides, and other carbohydrates including glucose, mannose, or dextrins; chelating agents such as Ethylenediaminetetraacetic acid (EDTA); sugar alcohols such as mannitol or sorbitol; salt-forming counterions such as sodium; and/or nonionic surfactants such as TWEEN™, polyethylene glycol (PEG), and PLURONICS™

[1753] The antibodies can be administered intravenously or through the nose, lung, for example, as a liquid or powder aerosol (lyophilized) or by nebulisation of a liquid. The composition can also be administered parenterally or subcutaneously. When administered systemically, the composition should be sterile, pyrogen-free and in a physiologically acceptable solution having due regard for pH, isotonicity and stability. These conditions are known to those skilled in the art.

[1754] Methods of administering a prophylactic or therapeutic agent (e.g., an antibody as disclosed herein), or pharmaceutical composition include, but are not limited to, parenteral administration (e.g., intradermal, intramuscular, intraperitoneal, intravenous and subcutaneous), epidural, and mucosal (e.g., intranasal and oral routes). In a specific example, a prophylactic or therapeutic agent (e.g., an antibody as disclosed herein), or a pharmaceutical composition is administered intranasally, intramuscularly, intravenously, or subcutaneously. The prophylactic or therapeutic agents, or compositions may be administered by any convenient route, for example by infusion or bolus injection, by absorption through epithelial or mucocutaneous linings (e.g., oral mucosa, intranasal mucosa, rectal and intestinal mucosa, etc.) and may be administered together with other biologically active agents. Administration can be systemic or local. Each dose may or may not be administered by an identical route of administration. In one example, an anti-SARS-CoV-2 antibody as disclosed herein may be administered via multiple routes of administration simultaneously or subsequently to other doses of the same or a different anti-SARS-CoV-2 antibody as disclosed herein.

[1755] Various delivery systems are known and can be used to administer a prophylactic or therapeutic agent (e.g., an antibody as disclosed herein), including, but not limited to, encapsulation in liposomes, microparticles, microcapsules, recombinant cells capable of expressing the antibody, receptor-mediated endocytosis (see, e.g., Wu and Wu, J. Biol. Chem. 262:4429-4432 (1987)), construction of a nucleic acid as part of a retroviral or other vector, etc. In addition, pulmonary administration can also be employed, e.g., by use of an inhaler or nebulizer, and formulation with an aerosolizing agent. See, e.g., U.S. Pat. Nos. 6,019,968, 5,985,320, 5,985,309, 5,934,272, 5,874,064, 5,855,913, 5,290,540, and 4,880,078; and PCT Publication Nos. WO92/19244, WO97/32572, WO97/44013, WO98/31346, and WO99/66903, each of which is incorporated herein by reference their entirety.

[1756] In a specific example, it may be desirable to administer a prophylactic or therapeutic agent, or a pharmaceutical composition as described herein locally to the area in need of treatment. This may be achieved by, for example, local infusion, by topical administration (e.g., by intranasal spray), by injection, or by means of an implant, said implant being of a porous, non-porous, or gelatinous material, including membranes, such as sialastic membranes, or fibres. When administering an anti-SARS-CoV-2 antibody, care must be taken to use materials to which the antibody does not absorb.

[1757] In the case of medicaments that are intended for local and/or topical administration, such as by absorption to epithelial or mucocutaneous linings, an antibody may be provided as an IgA isotype antibody. For human patients, human IgA1 or human IgA2 antibodies are preferred. Medicaments formulated for inhalation and/or for delivery of antibody (or its encoding nucleic acid, e.g., in a DNA vector) to the upper and/or lower respiratory tract, including formulations for delivery of a nebulised medicament, may comprise an IgA (e.g., human IgA1 or human IgA2) antibody. Inhalers, nebulisers and similar devices may thus be provided containing a medicament comprising an IgA antibody or its encoding nucleic acid, together with any buffers or other excipients suitable for stabilisation of the medicament and/or for promoting its delivery to the target tissue.

### Therapeutic Use

[1758] Antibodies described herein may be used to treat or prevent a SARS-CoV-2-related disease or condition, such as COVID-19. One aspect includes use of an antibody or composition described herein as a medicament.

[1759] Thus, in one example antibodies described herein or compositions described herein for use in a method of treating a SARS-CoV-2-related disease or condition are provided, said method comprising administering the antibody or composition to a patient. In another example, antibodies described herein or compositions described herein for use in a method of preventing a SARS-CoV-2-related disease or condition are provided, said method comprising administering the antibody or composition to a patient.

[1760] In one example, the SARS-CoV-2-related disease or condition is a SARS-CoV-2-mediated disease or condition.

[1761] Preferably, the SARS-CoV-2-related disease or condition is a COVID-19-related disease or condition. In some examples, the COVID-19-related disease or condition is COVID-19. In some examples, the COVID-19-related disease or condition is long manifestation of infection by SARS-CoV-2 such as ‘Long COVID’.

[1762] In one example, the antibody for use or the composition for use described above, one or more symptoms of COVID-19 are reduced. In one example, the progression of SARS-CoV-2 infection is reduced. In one example, the risk of developing COVID-19 is reduced. In one example, the risk of transmission of SARS-CoV-2 to and/or from a human is reduced.

[1763] In one example, said method further comprises administering at least one further therapeutic agent. In one example, the first antibody and further therapeutic agent are administered simultaneously, separately, or sequentially.

[1764] In one example, the further therapeutic agent is a further antibody. Accordingly, monoclonal antibodies of the invention might be administered as part of an antibody cocktail comprising multiple (e.g., 2, 3 or 4) different monoclonal antibodies.

[1765] The further antibody may be selected from:
[1766] i. an antibody that specifically binds to the receptor binding domain (RBD) of the S1 subunit of the SARS-CoV-2 spike protein and competes for binding to the SARS-CoV-2 spike protein with the human ACE2 receptor;
[1767] ii. an antibody that specifically binds to the receptor binding domain (RBD) of the S1 subunit of the SARS-CoV-2 spike protein and does not compete for binding to the SARS-CoV-2 spike protein with the human ACE2 receptor;
[1768] iii. an antibody that specifically binds to the N-terminal domain (NTD) of the S1 subunit of the of SARS-CoV-2 spike protein;
[1769] iv. an antibody that specifically binds to the S2 subunit of the of SARS-CoV-2 spike protein; and v. an antibody preferentially binds to the trimer form of the SARS-CoV-2 spike protein over the isolated RBD domain, S1 subunit and S2 subunit of the SARS-CoV-2 spike protein.

[1770] The further antibody might bind to the same or a different subunit of SARS-CoV-2 as the first antibody.

[1771] The further antibody might bind to the same or a different domain of SARS-CoV-2 as the first antibody.

[1772] An antibody cocktail might comprise a first antibody and a second antibody and optionally one or more further antibodies.

[1773] In one example, where the first antibody binds to the RBD of the SARS-CoV-2 spike protein and competes for binding to the SARS-CoV-2 spike protein with the human ACE2 receptor, the second antibody also specifically binds to the receptor binding domain (RBD) of the S1 subunit of the of SARS-CoV-2 spike protein.

[1774] An antibody cocktail might comprise, for example:
[1775] i. a first antibody that specifically binds to the receptor binding domain (RBD) of the S1 subunit of SARS-CoV-2 and which competes with ACE2 for binding to SARS-CoV-2; and
[1776] ii. a second antibody that also specifically binds to the receptor binding domain (RBD) of the S1 subunit of SARS-CoV-2 and which competes with ACE2 for binding to SARS-CoV-2.

[1777] An antibody cocktail might comprise, for example:
[1778] iii. a first antibody that specifically binds to the receptor binding domain (RBD) of the S1 subunit of SARS-CoV-2 and which competes with ACE2 for binding to SARS-CoV-2; and
[1779] iv. a second antibody that specifically binds to the receptor binding domain (RBD) of the S1 subunit of SARS-CoV-2 outside the ACE2 epitope region, such that the second antibody does not compete with ACE2 for binding to SARS-CoV-2.

[1780] Alternatively, in one example, where the first antibody binds to the RBD of the SARS-CoV-2 spike protein and competes for binding to the SARS-CoV-2 spike protein with the human ACE2 receptor, the second antibody specifically binds to the N-terminal domain (NTD) of the S1 subunit of the of SARS-CoV-2 spike protein. In another example, where the first antibody binds to the RBD of the SARS-CoV-2 spike protein and competes for binding to the SARS-CoV-2 spike protein with the human ACE2 receptor, the second antibody the further antibody specifically binds to the S2 subunit of the of SARS-CoV-2 spike protein. In still another example, where the first antibody binds to the RBD of the SARS-CoV-2 spike protein and competes for binding to the SARS-CoV-2 spike protein with the human ACE2 receptor, the second antibody preferentially binds to the trimer form of the SARS-CoV-2 spike protein over the isolated RBD domain, S1 subunit and S2 subunit of the SARS-CoV-2 spike protein

[1781] Provided herein is the use of an antibody described herein or a composition described herein in the manufacture of a medicament for treating a SARS-CoV-2-related disease or condition. Use of an antibody described herein or a composition described herein in the manufacture of a medicament for preventing a SARS-CoV-2- related disease or condition is also provided. Preferably, the SARS-CoV-2- related disease or condition is COVID-19. Thus, in one example, one or more symptoms of COVID-19 are reduced. In another example, the progression of SARS-CoV-2 infection is reduced. In another example, the risk of developing COVID-19 is reduced. In another example, the risk of transmission of SARS-CoV-2 to and/or from a human is reduced.

[1782] In one example, the use of an antibody or composition described herein further comprises administering at least one further therapeutic agent. In one example, the first antibody and further therapeutic agent are administered simultaneously, separately or sequentially. In one example, the further therapeutic agent is a further antibody as defined herein.

[1783] A method of treating a SARS-CoV-2-related disease or condition in a human, comprising administering to said human a therapeutically effective amount of an antibody described herein or a composition described herein is provided. A method of preventing a SARS-CoV-2-related disease or condition in a human, comprising administering to said human a therapeutically effective amount of an antibody described herein or a composition described herein is also provided. Preferably, the SARS-CoV-2-related disease or condition is COVID-19. In one example, one or more symptoms of COVID-19 are reduced. In one example, the progression of SARS-CoV-2 infection is reduced. In one example, the risk of developing COVID-19 is reduced. In one example, the risk of transmission of SARS-CoV-2 to and/or from a human is reduced.

[1784] In one example, said method further comprising administering at least one further therapeutic agent. In one example, the first antibody and further therapeutic agent are administered simultaneously, separately or sequentially. In one example, the further therapeutic agent is a further antibody as defined anywhere herein.

[1785] In one example, the antibody is administered as an antibody-drug conjugate in which the antibody is linked to a drug moiety. For example, the antibody may be linked to a drug moiety which may be a cytokine, chemokine, or small molecule antiviral.

[1786] Antibodies described herein may be used to prevent death and shorten the time to recovery and discharge for COVID19 patients. Patients will generally be human patients and may be patients admitted to hospital and diagnosed as testing positive for SARS-CoV-2 and/or suspected or believed to be suffering from COVID19. Patient groups for treatment include all people hospitalised with COVID-19.

[1787] In some examples, antibodies described herein or pharmaceutical compositions comprising the antibody as described herein may be used singly or in combination with other anti-SARS-CoV-2 antibodies or pharmaceutical compositions comprising other anti-SARS-CoV-2 antibodies. Combinations of two or more anti-SARS-CoV-2 antibodies may have additive or synergistic potency compared to the potency of a single antibody, e.g. as measured in a pseudovirus assay or by the live virus assay. In some examples, combinations of RBD and S2 antibodies have additive potency over a single mAb. In some examples, combinations of RBD antibodies have additive potency over a single mAb. In some examples, combinations of S2 antibodies have additive potency over a single mAb. In some examples, combinations of RBD and NTD antibodies have additive potency over a single mAb. In some examples, combinations of S2 and NTD antibodies have additive potency over a single mAb. In some examples, combinations of RBD and S2 antibodies have synergistic potency over a single mAb. In some examples, combinations of RBD antibodies have synergistic potency over a single mAb. In some examples, combinations of S2 antibodies have synergistic potency over a single mAb. In some examples, combinations of RBD and NTD antibodies have synergistic potency over a single mAb. In some examples, combinations of S2 and NTD antibodies have synergistic potency over a single mAb. In some examples, triple combinations of RBD, S2 and NTD antibodies have additive potency over a single mAb. In some examples, triple combinations of RBD, S2 and NTD antibodies have synergistic potency over a single mAb.

[1788] In some examples, the antibody as described herein or pharmaceutical composition comprising the antibody as described herein is administered in combination with a directly acting antiviral (DAA) drug. In some examples, the antibody as described herein or pharmaceutical composition comprising the antibody as described herein is administered in combination with anti-inflammatory medication. In some examples, the antibody as described herein or pharmaceutical composition comprising the antibody as described herein is administered in combination with a Type I interferon. In some examples, the antibody as described herein or pharmaceutical composition comprising the antibody as described herein is administered in combination with a Type II interferon. In some examples, the antibody as described herein or pharmaceutical composition comprising the antibody as described herein is administered in combination with a Type III interferon. In some examples, the antibody as described herein or pharmaceutical composition comprising the antibody as described herein is administered in combination with another drug that reduces COVID-19-related death. In some examples, the antibody as described herein or pharmaceutical composition comprising the antibody as described herein is administered in combination with another drug that reduces COVID-19-related induced inflammation. In some examples, the antibody as described herein or pharmaceutical composition comprising the antibody as described herein is administered in combination with another drug that reduces severity or disease progression from mild to severe for COVID-19.

[1789] In another example, a kit for treating SARS-CoV-2 related diseases, such as COVID-19, is provided, wherein the kit includes an antibody as described herein and instructions to administer the antibody to a subject in need of treatment. There is also provided a pharmaceutical or diagnostic pack or kit comprising one or more containers filled with one or more of the ingredients of the pharmaceutical compositions as disclosed herein, such as one or more anti-SARS-CoV-2 antibodies provided herein. Optionally associated with such container(s) can be a notice in the form prescribed by a governmental agency regulating the manufacture, use or sale of pharmaceuticals or biological products, which notice reflects approval by the agency of manufacture, use or sale for human administration, e.g., an authorisation number.

[1790] In another example, an article of manufacture that includes a container in which a composition containing an antibody as described herein and a packaging insert or label indicating that the composition can be used to treat a SARS-CoV-2 related disease, such as COVID-19, is provided. In one example, there is provided a kit for treating and/or preventing a SARS-CoV-2 related disease, such as COVID-19, the kit comprising an antibody as disclosed herein in any example or combination of examples (and optionally a further therapeutic agent as described elsewhere herein) optionally in combination with a label or instructions for use to treat and/or prevent said disease or condition in a human; optionally wherein the label or instructions comprise a marketing authorisation number (e.g., an FDA or EMA authorisation number); optionally wherein the kit comprises an IV or injection device that comprises the antibody. In another example, the kit comprises an antibody contained within a container or an IV bag. In another example, the container or IV bag is a sterile container or a sterile IV bag. In another example, the antibody is formulated into a pharmaceutical composition contained within a (sterile) container or contained within a (sterile) IV bag. In a further example, the kit further comprises instructions for use.

[1791] In another example, a kit for treating SARS-CoV-2 related diseases, such as COVID-19, is provided, wherein the kit includes an antibody as described herein and instructions to administer the antibody to a subject in need of treatment. The subject in need is specifically defined in the kit as someone of a specific higher risk group defined by epidemiological data, risk stratification data from the person's health records, risk stratification by the genotype of certain genes of the individual or the presence of certain biomarkers in the person's blood or other tissue sample. Where the risk stratification involves another pharmaceutical or diagnostic pack or kit, the combined product will act as a linked diagnostic/prognostic and treatment kit.

### Prevention of Infection—Prophylatic Use

[1792] Antibodies as described herein may be used prophylactically. Administration of antibodies may prevent infection or reduce the risk of infection by SARS-CoV-2. Antibodies may for example be used to prevent infection in those at risk in high transmission environments and to prevent infection in those unable to be vaccinated or where vaccine efficacy is low.
[1793] 1. It is estimated in the UK about hundreds of thousands of people may not be able to be vaccinated due to underlying co-morbidities and immune deficiencies.
[1794] 2. Vaccine efficacy is known to decrease gradually in people older the 50 years old. In the UK 18% of the population (˜12 million people) are older than 65 years old.
   Often, group 1 and group 2 overlap. These define risk groups for mAb prophylaxsis during peak SARS-CoV-2 transmission. A relevant end point is decreased rate of infection in the risk group(s).

### Diagnostics

[1795] Antibodies as described herein can be used to detect the presence, absence and/or level of SARS-CoV-2 in a biological sample from a patient. In one example, the biological sample is a tissue sample (e.g., in pathology studies or biopsy samples of tissue used for diagnostics and prognostics). In other examples, the biological sample is blood, plasma, serum, urine, faeces, cerebrospinal fluid (CFS). In other examples, the biological sample is from a nasal or throat swab. Liquid samples are convenient for use in many types of diagnostic assays.

[1796] The antibodies described herein can be used to identify the presence, absence and/or level of SARS-CoV-2 at baseline, i.e., before treatment.

[1797] The antibodies described herein can be used to guide therapy, particularly to identify the presence, absence and/or level of SARS-CoV-2 during or after treatment.

[1798] The antibodies described herein can be used for patient monitoring, to help evaluate whether a course of treatment is effective and whether or not treatment should be continued.

[1799] In one example, the antibody described herein is labelled with a detectable moiety, for example, a radiolabel, fluorescent label, enzymatic label, chemiluminescent labelled or a biotinyl group. Radioisotopes or radionuclides may include 3H, 14C, 15N, 35S, 90Y, 99Tc, 115In, 1251, 1311, fluorescent labels may include rhodamine, lanthanide phosphors or FITC and enzymatic labels may include horseradish peroxidase, β-galactosidase, luciferase, alkaline phosphatase. Additional labels include, by way of illustration and not limitation: enzymes, such as glucose-6-phosphate dehydrogenase (“G6PDH”), alpha-D-galactosidase, glucose oxydase, glucose amylase, carbonic anhydrase, acetylcholinesterase, lysozyme, malate dehydrogenase and peroxidase; dyes; additional fluorescent labels or fluorescers include, such as fluorescein and its derivatives, fluorochrome, GFP (GFP for “Green Fluorescent Protein”), dansyl, umbelliferone, phycoerythrin, phycocyanin, allophycocyanin, o-phthaldehyde, and fiuorescamine; fluorophores such as lanthanide cryptates and chelates e.g. Europium etc (Perkin Elmer and Cisbio Assays); chemoluminescent labels or chemiluminescers, such as isoluminol, luminol and the dioxetanes; sensitisers; coenzymes; enzyme substrates; particles, such as latex or carbon particles; metal sol; crystallite; liposomes; cells, etc., which may be further labelled with a dye, catalyst or other detectable group; molecules such as biotin, digoxygenin or 5-bromodeoxyuridine; toxin moieties, such as for example a toxin moiety selected from a group of Pseudomonas exotoxin (PE or a cytotoxic fragment or mutant thereof), Diptheria toxin or a cytotoxic fragment or mutant thereof, a botulinum toxin A, B, C, D, E or F, ricin or a cytotoxic fragment thereof e.g. ricin A, abrin or a cytotoxic fragment thereof, saporin or a cytotoxic fragment thereof, pokeweed antiviral toxin or a cytotoxic fragment thereof and bryodin 1 or a cytotoxic fragment thereof

[1800] In one example, the antibody can be administered to a patient, wherein the antibody is conjugated to a label. The presence of the label in the patient can be measured or observed, wherein a relatively high amount of the label may indicate a high risk of disease and a relatively low amount of the label may indicate a relatively low risk of the disease. In one example, the label is a contrast agent, isotopic tag, or fluorescent marker, such as green fluorescent protein.

[1801] For use in diagnostics, antibodies with high affinity, especially with fast on-rate and slow off-rate (e.g., as measured by SPR) are particularly valuable.

[1802] In some embodiments, it is desirable to include 2 antibodies in a diagnostic assay and these should preferably be directed to different regions of the spike protein. The diagnostic assay could be a double antigen binding assay (DABA). In a DABA, a first antibody is used as a capture antibody to bind the virus or spike protein in a sample (for this purpose, a high affinity antibody with fast on-rate and slow off-rate is desirable, as noted above), and a second antibody, specific for an epitope that is different from the capture antibody's epitope, is used for detection. The second antibody may thus be detectably labelled, by direct or indirect labelling. A DABA may comprise providing the first antibody (optionally immobilised on a surface), contacting the surface with a sample to allow capture of antigen, if present, followed by washing to remove unbound antigen and sample, and then exposing the surface to the detection antibody to allow binding to the antigen, if present, washing to remove unbound detection antibody, and detecting the presence of the detection antibody. The presence of the detection antibody indicates that the sample is positive for the spike protein. This type of assay may be used to determine whether a patient is infected with the virus.

[1803] In other embodiments, a diagnostic assay may employ neutralising antibodies (e.g., an antibody that neutralises binding of spike protein to ACE2) as competitive antibodies to determine the level of neutralising antibodies in the serum of convalescent patients, vaccinated individuals or those who were previously infected with SARS-CoV-2. The neutralising monoclonal antibody is supplied in the assay in excess, and competition with antibodies in the sample is assessed. Detection of competition is indicative of the presence of neutralising antibody in the sample.

[1804] In one example, a kit for detecting SARS-CoV-2 in a biological sample is provided. The kit can be used to screen for SARS-CoV-2 related diseases. In one example, the kit includes an antibody according to the invention as described anywhere herein and a means for determining whether the antibody is bound to SARS-CoV-2 in a sample. In one example, the antibody is specific for SARS-CoV-2. In one example, the antibody is labelled. In another example, the antibody is an unlabelled primary antibody and the kit includes means for detecting the primary antibody. In one example, the means for detecting includes a labelled secondary antibody that is an anti-immunoglobulin antibody. The antibody may be labelled with any suitable marker, including, for example, a fluorochrome, an enzyme, a radionuclide and a radiopaque material.

[1805] In one example, the primary antibody is an antibody that specifically binds to the RBD of SARS-CoV-2 spike protein and does not compete for binding with the ACE2 receptor and the secondary antibody is an antibody that specifically binds to the RBD of SARS-CoV-2 spike protein and does compete for binding with the ACE2 receptor.

[1806] In one example, a kit for detecting SARS-CoV-2 is provided, wherein the kit includes an antibody as described herein. In one example, the kit may also include instructions and one or more reagents for detecting SARS-CoV-2.

### CLAUSES

[1807] Aspects of the invention are disclosed in the following lettered and numbered clauses:

[1808] A1. An antibody that specifically binds to the receptor binding domain (RBD) of the SARS-CoV-2 spike protein, wherein the antibody competes for binding to the SARS-CoV-2 spike protein with the human ACE2 receptor.

[1809] A2. An antibody according to clause A1,
[1810] wherein the antibody binds the isolated RBD of the SARS-CoV-2 spike protein with a KD of 10-9 M or lower (e.g. as measured by surface plasmon resonance (SPR)).

[1811] A3. An antibody according to clause A1,
[1812] wherein the antibody neutralises SARS-CoV-2 with an IC50 of 50 pM or lower (e.g. as measured in a pseudovirus neutralisation assay).

[1813] A4. An antibody according to clause A2 or clause A3,
[1814] wherein the antibody binds the isolated RBD of the SARS-CoV-2 spike protein with a KD of 10-9 M or lower (e.g. as measured by surface plasmon resonance (SPR)) and wherein the antibody neutralises SARS-CoV-2 with an IC50 of 50 pM or lower (e.g. as measured in a pseudovirus neutralisation assay).

[1815] A5. An antibody according to any one of clauses A1 to A4,
[1816] wherein the antibody comprises a variable heavy (VH) domain sequence comprising complementarity determining regions (CDRs) HCDR1, HCDR2 and HCDR3, and a variable light (VL) domain sequence comprising complementarity determining regions LCDR1, LCDR2 and LCDR3,
[1817] wherein the HCDR3 is the HCDR3 of antibody IMPI-029, IMPI-056, IMPI-005, IMPI-012, IMPI-052, IMPI-002, IMPI-041, IMPI-036, IMPI-055, IMPI-054, IMPI-042, IMPI-021, IMPI-004, IMPI-047, IMPI-017, IMPI-059, or IMPI-028.

[1818] A6. An antibody according to clause A2,
[1819] wherein the antibody comprises a variable heavy (VH) domain sequence comprising complementarity determining regions (CDRs) HCDR1, HCDR2, and HCDR3, and a variable light (VL) domain sequence comprising complementarity determining regions LCDR1, LCDR2 and LCDR3,
[1820] wherein the HCDR3 is the HCDR3 of antibody IMPI-004, IMPI-029, IMPI-056, IMPI-055, or IMPI-059.

[1821] A7. An antibody according to clause A3,
[1822] wherein the antibody comprises a variable heavy (VH) domain sequence comprising complementarity determining regions (CDRs) HCDR1, HCDR2, and HCDR3, and a variable light (VL) domain sequence comprising complementarity determining regions LCDR1, LCDR2 and LCDR3,
[1823] wherein the HCDR3 is the HCDR3 of antibody IMPI-004, IMPI-029, IMPI-055, IMPI-059, or IMPI-017.

[1824] A8. An antibody according to clause A4,
[1825] wherein the antibody comprises a variable heavy (VH) domain sequence comprising complementarity determining regions (CDRs) HCDR1, HCDR2, and HCDR3, and a variable light (VL) domain sequence comprising complementarity determining regions LCDR1, LCDR2 and LCDR3,
[1826] wherein the HCDR3 is the HCDR3 of antibody IMPI-004, IMPI-029, IMPI-055, or IMPI-059.

[1827] A9. The antibody according to clause A5, wherein the HCDR3 is the HCDR3 of antibody IMPI-029.

[1828] A10. The antibody according to clause A5, wherein the HCDR3 is the HCDR3 of antibody IMPI-056.

[1829] A11. The antibody according to clause A5, wherein the HCDR3 is the HCDR3 of antibody IMPI-005.

[1830] A12. The antibody according to clause A5, wherein the HCDR3 is the HCDR3 of antibody IMPI-012.

[1831] A13. The antibody according to clause A5, wherein the HCDR3 is the HCDR3 of antibody IMPI-052.

[1832] A14. The antibody according to clause A5, wherein the HCDR3 is the HCDR3 of antibody IMPI-002.

[1833] A15. The antibody according to clause A5, wherein the HCDR3 is the HCDR3 of antibody IMPI-041.

[1834] A16. The antibody according to clause A5, wherein the HCDR3 is the HCDR3 of antibody IMPI-036.

[1835] A17. The antibody according to clause A5, wherein the HCDR3 is the HCDR3 of antibody IMPI-055.

[1836] A18. The antibody according to clause A5, wherein the HCDR3 is the HCDR3 of antibody IMPI-054.

[1837] A19. The antibody according to clause A5, wherein the HCDR3 is the HCDR3 of antibody IMPI-042.

[1838] A20. The antibody according to clause A5, wherein the HCDR3 is the HCDR3 of antibody IMPI-021.

[1839] A21. The antibody according to clause A5, wherein the HCDR3 is the HCDR3 of antibody IMPI-004.

[1840] A22. The antibody according to clause A5, wherein the HCDR3 is the HCDR3 of antibody IMPI-047.

[1841] A23. The antibody according to clause A5, wherein the HCDR3 is the HCDR3 of antibody IMPI-017.

[1842] A24. The antibody according to clause A5, wherein the HCDR3 is the HCDR3 of antibody IMPI-059.

[1843] A25. The antibody according to clause A5, wherein the HCDR3 is the HCDR3 of antibody IMPI-028.

[1844] A26. An anti-SARS-CoV-2 antibody,
[1845] wherein the antibody comprises a variable heavy (VH) domain sequence comprising complementarity determining regions (CDRs) HCDR1, HCDR2, and HCDR3, and a variable light (VL) domain sequence comprising complementarity determining regions LCDR1, LCDR2 and LCDR3,
[1846] wherein the CDRs are those of antibody IMPI-029, IMPI-056, IMPI-005, IMPI-012, IMPI-052, IMPI-002, IMPI-041, IMPI-036, IMPI-055, IMPI-054, IMPI-042, IMPI-021, IMPI-004, IMPI-047, IMPI-017, IMPI-059, or IMPI-028.

[1847] A27. An anti-SARS-CoV-2 antibody which competes for binding to the SARS-CoV-2 spike protein with the human ACE2 receptor,
[1848] wherein the antibody comprises a variable heavy (VH) domain sequence comprising complementarity determining regions (CDRs) HCDR1, HCDR2, and HCDR3, and a variable light (VL) domain sequence comprising complementarity determining regions LCDR1, LCDR2 and LCDR3,
[1849] wherein the CDRs are those of antibody IMPI-029, IMPI-056, IMPI-005, IMPI-012, IMPI-052, IMPI-002, IMPI-041, IMPI-036, IMPI-055, IMPI-054, IMPI-042, IMPI-021, IMPI-004, IMPI-047, IMPI-017, IMPI-059, or IMPI-028.

[1850] A28. An antibody according to any one of clauses A1 to A4,
[1851] wherein the antibody comprises a variable heavy (VH) domain sequence comprising complementarity determining regions (CDRs) HCDR1, HCDR2, and HCDR3, and a variable light (VL) domain sequence comprising complementarity determining regions LCDR1, LCDR2 and LCDR3,
[1852] wherein the CDRs are those of antibody IMPI-029, IMPI-056, IMPI-005, IMPI-012, IMPI-052, IMPI-002, IMPI-041, IMPI-036, IMPI-055, IMPI-054, IMPI-042, IMPI-021, IMPI-004, IMPI-047, IMPI-017, IMPI-059, or IMPI-028.

[1853] A29. An antibody according to clause A2,
[1854] wherein the antibody comprises a variable heavy (VH) domain sequence comprising complementarity determining regions (CDRs) HCDR1, HCDR2, and HCDR3, and a variable light (VL) domain sequence comprising complementarity determining regions LCDR1, LCDR2 and LCDR3,
[1855] wherein the CDRs are those of antibody IMPI-004, IMPI-029, IMPI-056, IMPI-055, or IMPI-059.

[1856] A30. An antibody according to clause A3,
[1857] wherein the antibody comprises a variable heavy (VH) domain sequence comprising complementarity determining regions (CDRs) HCDR1, HCDR2, and HCDR3, and a variable light (VL) domain sequence comprising complementarity determining regions LCDR1, LCDR2 and LCDR3,
[1858] wherein the CDRs are those of antibody IMPI-004, IMPI-029, IMPI-055, IMPI-059 or IMPI-017.

[1859] A31. An antibody according to clauseA4,
[1860] wherein the antibody comprises a variable heavy (VH) domain sequence comprising complementarity determining regions (CDRs) HCDR1, HCDR2, and HCDR3, and a variable light (VL) domain sequence comprising complementarity determining regions LCDR1, LCDR2 and LCDR3,
[1861] wherein the CDRs are those of antibody IMPI-004, IMPI-029, IMPI-055 or IMPI-059.

[1862] A32. The antibody according to any one of clauses A26 to A28, wherein the antibody has the CDRs of antibody IMPI-029.

[1863] A33. The antibody according to any one of clauses A26 to A28, wherein the antibody has the CDRs of antibody IMPI-056.

[1864] A34. The antibody according to any one of clauses A26 to A28, wherein the antibody has the CDRs of antibody IMPI-005.

[1865] A35. The antibody according to any one of clauses A26 to A28, wherein the antibody has the CDRs of antibody IMPI-012.

[1866] A36. The antibody according to any one of clauses A26 to A28, wherein the antibody has the CDRs of antibody IMPI-052.

[1867] A37. The antibody according to any one of clauses A26 to A28, wherein the antibody has the CDRs of antibody IMPI-002.

[1868] A38. The antibody according to any one of clauses A26 to A28, wherein the antibody has the CDRs of antibody IMPI-041.

[1869] A39. The antibody according to any one of clauses A26 to A28, wherein the antibody has the CDRs of antibody IMPI-036.

[1870] A40. The antibody according to any one of clauses A26 to A28, wherein the antibody has the CDRs of antibody IMPI-055.

[1871] A41. The antibody according to any one of clauses A26 to A28, wherein the antibody has the CDRs of antibody IMPI-054.

[1872] A42. The antibody according to any one of clauses A26 to A28, wherein the antibody has the CDRs of antibody IMPI-042.

[1873] A43. The antibody according to any one of clauses A26 to A28, wherein the antibody has the CDRs of antibody IMPI-021.

[1874] A44. The antibody according to any one of clauses A26 to A28, wherein the antibody has the CDRs of antibody IMPI-004.

[1875] A45. The antibody according to any one of clauses A26 to A28, wherein the antibody has the CDRs of antibody IMPI-047.

[1876] A46. The antibody according to any one of clauses A26 to A28, wherein the antibody has the CDRs of antibody IMPI-017.

[1877] A47. The antibody according to any one of clauses A26 to A28, wherein the antibody has the CDRs of antibody IMPI-059.

[1878] A48. The antibody according to any one of clauses A26 to A28, wherein the antibody has the CDRs of antibody IMPI-028.

[1879] A49. An antibody according to any one of clauses A1 to A4,
[1880] wherein the antibody comprises a variable heavy (VH) domain sequence and a variable light (VL) domain sequence and wherein the variable heavy (VH) domain and variable light (VL) domain sequences respectively comprise the variable heavy (VH) domain and variable light (VL) domain sequences of antibody IMPI-029, IMPI-056, IMPI-005, IMPI-012, IMPI-052, IMPI-002, IMPI-041, IMPI-036, IMPI-055, IMPI-054, IMPI-042, IMPI-021, IMPI-004, IMPI-047, IMPI-017, IMPI-059, or IMPI-028, optionally with 1, 2, 3, 4 or 5 amino acid alterations outside the complementarity determining regions (CDRs) in the variable heavy (VH) domain sequence and optionally with 1, 2, 3, 4 or 5 amino acid alterations outside the complementarity determining regions (CDRs) in the variable light (VL) domain sequence.

[1881] A50. An antibody according to clause A2,
[1882] wherein the antibody comprises a variable heavy (VH) domain sequence and a variable light (VL) domain sequence and wherein the variable heavy (VH) domain and variable light (VL) domain sequences respectively comprise the variable heavy (VH) domain and variable light (VL) domain sequences of antibody IMPI-004, IMPI-029, IMPI-056, IMPI-055 or IMPI-059, optionally with 1, 2, 3, 4 or 5 amino acid alterations outside the complementarity determining regions (CDRs) in the variable heavy (VH) domain sequence and optionally with 1, 2, 3, 4 or 5 amino acid alterations outside the complementarity determining regions (CDRs) in the variable light (VL) domain sequence.

[1883] A51. An antibody according to clause A3,
[1884] wherein the antibody comprises a variable heavy (VH) domain sequence and a variable light (VL) domain sequence and wherein the variable heavy (VH) domain and variable light (VL) domain sequences respectively comprise the variable heavy (VH) domain and variable light (VL) domain sequences of antibody IMPI-004, IMPI-029, IMPI-055, or IMPI-059 or IMPI-017, optionally with 1, 2, 3, 4 or 5 amino acid alterations outside the complementarity determining regions (CDRs) in the variable heavy (VH) domain sequence and optionally with 1, 2, 3, 4 or 5 amino acid alterations outside the complementarity determining regions (CDRs) in the variable light (VL) domain sequence.

[1885] A52. An antibody according to clause A4,
[1886] wherein the antibody comprises a variable heavy (VH) domain sequence and a variable light (VL) domain sequence and wherein the variable heavy (VH) domain and variable light (VL) domain sequences respectively comprise the variable heavy (VH) domain and variable light (VL) domain sequences of antibody IMPI-004, IMPI-029, IMPI-055 or IMPI-059, optionally with 1, 2, 3, 4 or 5 amino acid alterations outside the complementarity determining regions (CDRs) in the variable heavy (VH) domain sequence and optionally with 1, 2, 3, 4 or 5 amino acid alterations outside the complementarity determining regions (CDRs) in the variable light (VL) domain sequence.

[1887] A53. The antibody according to clause A49, wherein the antibody comprises a variable heavy (VH) domain sequence of antibody IMPI-029, optionally with 1, 2, 3, 4 or 5 amino acid alterations outside the complementarity determining regions (CDRs), and a variable light (VL) domain sequence of antibody IMPI-029, optionally with 1, 2, 3, 4 or 5 amino acid alterations outside the complementarity determining regions (CDRs).

[1888] A54. The antibody according to clause A49, wherein the antibody comprises a variable heavy (VH) domain sequence of antibody IMPI-056, optionally with 1, 2, 3, 4 or 5 amino acid alterations outside the complementarity determining regions (CDRs), and a variable light (VL) domain sequence of antibody IMPI-056, optionally with 1, 2, 3, 4 or 5 amino acid alterations outside the complementarity determining regions (CDRs).

[1889] A55. The antibody according to clause A49, wherein the antibody comprises a variable heavy (VH) domain sequence of antibody IMPI-005, optionally with 1, 2, 3, 4 or 5 amino acid alterations outside the complementarity determining regions (CDRs), and a variable light (VL) domain sequence of antibody IMPI-005, optionally with 1, 2, 3, 4 or 5 amino acid alterations outside the complementarity determining regions (CDRs).

[1890] A56. The antibody according to clause A49, wherein the antibody comprises a variable heavy (VH) domain sequence of antibody IMPI-012, optionally with 1, 2, 3, 4 or 5 amino acid alterations outside the complementarity determining regions (CDRs), and a variable light (VL) domain sequence of antibody IMPI-012, optionally with 1, 2, 3, 4 or 5 amino acid alterations outside the complementarity determining regions (CDRs).

[1891] A57. The antibody according to clause A49, wherein the antibody comprises a variable heavy (VH) domain sequence of antibody IMPI-052, optionally with 1, 2, 3, 4 or 5 amino acid alterations outside the complementarity determining regions (CDRs), and a variable light (VL) domain sequence of antibody IMPI-052, optionally with 1, 2, 3, 4 or 5 amino acid alterations outside the complementarity determining regions (CDRs).

[1892] A58. The antibody according to clause A49, wherein the antibody comprises a variable heavy (VH) domain sequence of antibody IMPI-002, optionally with 1, 2, 3, 4 or 5 amino acid alterations outside the complementarity determining regions (CDRs), and a variable light (VL) domain sequence of antibody IMPI-002, optionally with 1, 2, 3, 4 or 5 amino acid alterations outside the complementarity determining regions (CDRs).

[1893] A59. The antibody according to clause A49, wherein the antibody comprises a variable heavy (VH) domain sequence of antibody IMPI-041, optionally with 1, 2, 3, 4 or 5 amino acid alterations outside the complementarity determining regions (CDRs), and a variable light (VL) domain sequence of antibody IMPI-041, optionally with 1, 2, 3, 4 or 5 amino acid alterations outside the complementarity determining regions (CDRs).

[1894] A60. The antibody according to clause A49, wherein the antibody comprises a variable heavy (VH) domain sequence of antibody IMPI-036, optionally with 1, 2, 3, 4 or 5 amino acid alterations outside the complementarity determining regions (CDRs), and a variable light (VL) domain sequence of antibody IMPI-036, optionally with 1, 2, 3, 4 or 5 amino acid alterations outside the complementarity determining regions (CDRs).

[1895] A61. The antibody according to clause A49, wherein the antibody comprises a variable heavy (VH) domain sequence of antibody IMPI-055, optionally with 1, 2, 3, 4 or 5 amino acid alterations outside the complementarity determining regions (CDRs), and a variable light (VL) domain sequence of antibody IMPI-055, optionally with 1, 2, 3, 4 or 5 amino acid alterations outside the complementarity determining regions (CDRs).

[1896] A62. The antibody according to clause A49, wherein the antibody comprises a variable heavy (VH) domain sequence of antibody IMPI-054, optionally with 1, 2, 3, 4 or 5 amino acid alterations outside the complementarity determining regions (CDRs), and a variable light (VL) domain sequence of antibody IMPI-054, optionally with 1, 2, 3, 4 or 5 amino acid alterations outside the complementarity determining regions (CDRs).

[1897] A63. The antibody according to clause A49, wherein the antibody comprises a variable heavy (VH) domain sequence of antibody IMPI-042, optionally with 1, 2, 3, 4 or 5 amino acid alterations outside the complementarity determining regions (CDRs), and a variable light (VL) domain sequence of antibody IMPI-042, optionally with 1, 2, 3, 4 or 5 amino acid alterations outside the complementarity determining regions (CDRs).

[1898] A64. The antibody according to clause A49, wherein the antibody comprises a variable heavy (VH) domain sequence of antibody IMPI-021, optionally with 1, 2, 3, 4 or 5 amino acid alterations outside the complementarity determining regions (CDRs), and a variable light (VL) domain sequence of antibody IMPI-021, optionally with 1, 2, 3, 4 or 5 amino acid alterations outside the complementarity determining regions (CDRs).

[1899] A65. The antibody according to clause A49, wherein the antibody comprises a variable heavy (VH) domain sequence of antibody IMPI-004, optionally with 1, 2, 3, 4 or 5 amino acid alterations outside the complementarity determining regions (CDRs), and a variable light (VL) domain sequence of antibody IMPI-004, optionally with 1, 2, 3, 4 or 5 amino acid alterations outside the complementarity determining regions (CDRs).

[1900] A66. The antibody according to clause A49, wherein the antibody comprises a variable heavy (VH) domain sequence of antibody IMPI-047, optionally with 1, 2, 3, 4 or 5 amino acid alterations outside the complementarity determining regions (CDRs), and a variable light (VL) domain sequence of antibody IMPI-047, optionally with 1, 2, 3, 4 or 5 amino acid alterations outside the complementarity determining regions (CDRs).

[1901] A67. The antibody according to clause A49, wherein the antibody comprises a variable heavy (VH) domain sequence of antibody IMPI-017, optionally with 1, 2, 3, 4 or 5 amino acid alterations outside the complementarity determining regions (CDRs), and a variable light (VL) domain sequence of antibody IMPI-017, optionally with 1, 2, 3, 4 or 5 amino acid alterations outside the complementarity determining regions (CDRs).

[1902] A68. The antibody according to clause A49, wherein the antibody comprises a variable heavy (VH) domain sequence of antibody IMPI-059, optionally with 1, 2, 3, 4 or 5 amino acid alterations outside the complementarity determining regions (CDRs), and a variable light (VL) domain sequence of antibody IMPI-059, optionally with 1, 2, 3, 4 or 5 amino acid alterations outside the complementarity determining regions (CDRs).

[1903] A69. The antibody according to clause A49, wherein the antibody comprises a variable heavy (VH) domain sequence of antibody IMPI-028, optionally with 1, 2, 3, 4 or 5 amino acid alterations outside the complementarity determining regions (CDRs), and a variable light (VL) domain sequence of antibody IMPI-028, optionally with 1, 2, 3, 4 or 5 amino acid alterations outside the complementarity determining regions (CDRs).

[1904] A70. An antibody according to any one of clauses A1 to A4,
[1905] wherein the antibody comprises a variable heavy (VH) domain sequence and a variable light (VL) domain sequence and wherein the variable heavy (VH) domain and variable light (VL) domain sequences respectively comprise a sequence having at least 90% identity to the variable heavy (VH) and variable light (VL) domain sequences of antibody IMPI-029, IMPI-056, IMPI-005, IMPI-012, IMPI-052, IMPI-002, IMPI-041, IMPI-036, IMPI-055, IMPI-054, IMPI-042, IMPI-021, IMPI-004, IMPI-047, IMPI-017, IMPI-059, or IMPI-028, provided that the antibody has the CDRs of antibody IMPI-029, IMPI-056, IMPI-005, IMPI-012, IMPI-052, IMPI-002, IMPI-041, IMPI-036, IMPI-055, IMPI-054, IMPI-042, IMPI-021, IMPI-004, IMPI-047, IMPI-017, IMPI-059, or IMPI-028.

[1906] A71. An antibody according to clause A2,
[1907] wherein the antibody comprises a variable heavy (VH) domain sequence and a variable light (VL) domain sequence and wherein the variable heavy (VH) domain and variable light (VL) domain sequences respectively comprise a sequence having at least 90% identity to the variable heavy (VH) and variable light (VL) domain sequences of antibody IMPI-004, IMPI-029, IMPI-056, IMPI-055 or IMPI-059, provided that the antibody has the CDRs of antibody IMPI-004, IMPI-029, IMPI-056, IMPI-055 or IMPI-059.

[1908] A72. An antibody according to clause A3,
[1909] wherein the antibody comprises a variable heavy (VH) domain sequence and a variable light (VL) domain sequence and wherein the variable heavy (VH) domain and variable light (VL) domain sequences respectively comprise a sequence having at least 90% identity to the variable heavy (VH) and variable light (VL) domain sequences of antibody IMPI-004, IMPI-029, IMPI-055, or IMPI-059 or IMPI-017, provided that the antibody has the CDRs of antibody IMPI-004, IMPI-029, IMPI-055, or IMPI-059 or IMPI-017.

[1910] A73. An antibody according to clause A4,
[1911] wherein the antibody comprises a variable heavy (VH) domain sequence and a variable light (VL) domain sequence and wherein the variable heavy (VH) domain and variable light (VL) domain sequences respectively comprise a sequence having at least 90% identity to the variable heavy (VH) and variable light (VL) domain sequences of antibody IMPI-004, IMPI-029, IMPI-055 or IMPI-059, provided that the antibody has the CDRs of antibody IMPI-004, IMPI-029, IMPI-055 or IMPI-059.

[1912] A74. The antibody according to clause A70, wherein the variable heavy (VH) domain sequence comprises a sequence having at least 90% identity to the VH domain sequence of antibody IMPI-029 and the variable light (VL) domain sequence comprises a sequence having at least 90% identity to the VL domain sequence of antibody IMPI-029, provided that the antibody has the CDRs of antibody IMPI-029.

[1913] A75. The antibody according to clause A70, wherein the variable heavy (VH) domain sequence comprises a sequence having at least 90% identity to the VH domain sequence of antibody IMPI-056 and the variable light (VL) domain sequence comprises a sequence having at least 90% identity to the VL domain sequence of antibody IMPI-056, provided that the antibody has the CDRs of antibody IMPI-056.

[1914] A76. The antibody according to clause A70, wherein the variable heavy (VH) domain sequence comprises a sequence having at least 90% identity to the VH domain sequence of antibody IMPI-005 and the variable light (VL) domain sequence comprises a sequence having at least 90% identity to the VL domain sequence of antibody IMPI-005, provided that the antibody has the CDRs of antibody IMPI-005.

[1915] A77. The antibody according to clause A70, wherein the variable heavy (VH) domain sequence comprises a sequence having at least 90% identity to the VH domain sequence of antibody IMPI-012 and the variable light (VL) domain sequence comprises a sequence having at least 90% identity to the VL domain sequence of antibody IMPI-012, provided that the antibody has the CDRs of antibody IMPI-012.

[1916] A78. The antibody according to clause A70, wherein the variable heavy (VH) domain sequence comprises a sequence having at least 90% identity to the VH domain sequence of antibody IMPI-052 and the variable light (VL) domain sequence comprises a sequence having at least 90% identity to the VL domain sequence of antibody IMPI-052, provided that the antibody has the CDRs of antibody IMPI-052.

[1917] A79. The antibody according to clause A70, wherein the variable heavy (VH) domain sequence comprises a sequence having at least 90% identity to the VH domain sequence of antibody IMPI-002 and the variable light (VL) domain sequence comprises a sequence having at least 90% identity to the VL domain sequence of antibody IMPI-002, provided that the antibody has the CDRs of antibody IMPI-002.

[1918] A80. The antibody according to clause A70, wherein the variable heavy (VH) domain sequence comprises a sequence having at least 90% identity to the VH domain sequence of antibody IMPI-041 and the variable light (VL) domain sequence comprises a sequence having at least 90% identity to the VL domain sequence of antibody IMPI-041, provided that the antibody has the CDRs of antibody IMPI-041.

[1919] A81. The antibody according to clause A70, wherein the variable heavy (VH) domain sequence comprises a sequence having at least 90% identity to the VH domain sequence of antibody IMPI-036 and the variable light (VL) domain sequence comprises a sequence having at least 90% identity to the VL domain sequence of antibody IMPI-036, provided that the antibody has the CDRs of antibody IMPI-036.

[1920] A82. The antibody according to clause A70, wherein the variable heavy (VH) domain sequence comprises a sequence having at least 90% identity to the VH domain sequence of antibody IMPI-055 and the variable light (VL) domain sequence comprises a sequence having at least 90% identity to the VL domain sequence of antibody IMPI-055, provided that the antibody has the CDRs of antibody IMPI-055.

[1921] A83. The antibody according to clause A70, wherein the variable heavy (VH) domain sequence comprises a sequence having at least 90% identity to the VH domain sequence of antibody IMPI-054 and the variable light (VL) domain sequence comprises a sequence having at least 90% identity to the VL domain sequence of antibody IMPI-054, provided that the antibody has the CDRs of antibody IMPI-054.

[1922] A84. The antibody according to clause A70, wherein the variable heavy (VH) domain sequence comprises a sequence having at least 90% identity to the VH domain sequence of antibody IMPI-042 and the variable light (VL) domain sequence comprises a sequence having at least 90% identity to the VL domain sequence of antibody IMPI-042, provided that the antibody has the CDRs of antibody IMPI-042.

[1923] A85. The antibody according to clause A70, wherein the variable heavy (VH) domain sequence comprises a sequence having at least 90% identity to the VH domain sequence of antibody IMPI-021 and the variable light (VL) domain sequence comprises a sequence having at least 90% identity to the VL domain sequence of antibody IMPI-021, provided that the antibody has the CDRs of antibody IMPI-021.

[1924] A86. The antibody according to clause A70, wherein the variable heavy (VH) domain sequence comprises a sequence having at least 90% identity to the VH domain sequence of antibody IMPI-004 and the variable light (VL) domain sequence comprises a sequence having at least 90% identity to the VL domain sequence of antibody IMPI-004, provided that the antibody has the CDRs of antibody IMPI-004.

[1925] A87. The antibody according to clause A70, wherein the variable heavy (VH) domain sequence comprises a sequence having at least 90% identity to the VH domain sequence of antibody IMPI-047 and the variable light (VL) domain sequence comprises a sequence having at least 90% identity to the VL domain sequence of antibody IMPI-047, provided that the antibody has the CDRs of antibody IMPI-047.

[1926] A88. The antibody according to clause A70, wherein the variable heavy (VH) domain sequence comprises a sequence having at least 90% identity to the VH domain sequence of antibody IMPI-017 and the variable light (VL) domain sequence comprises a sequence having at least 90% identity to the VL domain sequence of antibody IMPI-017, provided that the antibody has the CDRs of antibody IMPI-017.

[1927] A89. The antibody according to clause A70, wherein the variable heavy (VH) domain sequence comprises a sequence having at least 90% identity to the VH domain sequence of antibody IMPI-059 and the variable light (VL) domain sequence comprises a sequence having at least 90% identity to the VL domain sequence of antibody IMPI-059, provided that the antibody has the CDRs of antibody IMPI-059.

[1928] A90. The antibody according to clause A70, wherein the variable heavy (VH) domain sequence comprises a sequence having at least 90% identity to the VH domain sequence of antibody IMPI-028 and the variable light (VL) domain sequence comprises a sequence having at least 90% identity to the VL domain sequence of antibody IMPI-028, provided that the antibody has the CDRs of antibody IMPI-028.

[1929] A91. An antibody to any one of clauses A1 to A4, wherein the antibody comprises a variable heavy (VH) domain sequence and a variable light (VL) domain sequence and wherein the variable heavy (VH) domain and variable light (VL) domain sequences respectively comprise the variable heavy (VH) and variable light (VL) domain sequences of antibody IMPI-029, IMPI-056, IMPI-005, IMPI-012, IMPI-052, IMPI-002, IMPI-041, IMPI-036, IMPI-055, IMPI-054, IMPI-042, IMPI-021, IMPI-004, IMPI-047, IMPI-017, IMPI-059, or IMPI-028.

[1930] A92. An antibody that specifically binds to the receptor binding domain (RBD) of the SARS-CoV-2 spike protein, wherein the antibody comprises a variable heavy (VH) domain sequence and a variable light (VL) domain sequence and wherein the variable heavy (VH) domain and variable light (VL) domain sequences respectively comprise the variable heavy (VH) and variable light (VL) domain sequences of antibody IMPI-029, IMPI-056, IMPI-005, IMPI-012, IMPI-052, IMPI-002, IMPI-041, IMPI-036, IMPI-055, IMPI-054, IMPI-042, IMPI-021, IMPI-004, IMPI-047, IMPI-017, IMPI-059, or IMPI-028.

[1931] A93. The antibody according to clause A91 or clause A92, wherein the antibody comprises the VH domain and VL domain sequences of antibody IMPI-029.

[1932] A94. The antibody according to clause A91 or clause A92, wherein the antibody comprises the VH domain and VL domain sequences of antibody IMPI-056.

[1933] A95. The antibody according to clause A91 or clause A92, wherein the antibody comprises the VH domain and VL domain sequences of antibody IMPI-005.

[1934] A96. The antibody according to clause A91 or clause A92, wherein the antibody comprises the VH domain and VL domain sequences of antibody IMPI-012.

[1935] A97. The antibody according to clause A91 or clause A92, wherein the antibody comprises the VH domain and VL domain sequences of antibody IMPI-052.

[1936] A98. The antibody according to clause A91 or clause A92, wherein the antibody comprises the VH domain and VL domain sequences of antibody IMPI-002.

[1937] A99. The antibody according to clause A91 or clause A92, wherein the antibody comprises the VH domain and VL domain sequences of antibody IMPI-041.

[1938] A100. The antibody according to clause A91 or clause A92, wherein the antibody comprises the VH domain and VL domain sequences of antibody IMPI-036.

[1939] A101. The antibody according to clause A91 or clause A92, wherein the antibody comprises the VH domain and VL domain sequences of antibody IMPI-055.

[1940] A102. The antibody according to clause A91 or clause A92, wherein the antibody comprises the VH domain and VL domain sequences of antibody IMPI-054.

[1941] A103. The antibody according to clause A91 or clause A92, wherein the antibody comprises the VH domain and VL domain sequences of antibody IMPI-042.

[1942] A104. The antibody according to clause A91 or clause A92, wherein the antibody comprises the VH domain and VL domain sequences of antibody IMPI-021.

[1943] A105. The antibody according to clause A91 or clause A92, wherein the antibody comprises the VH domain and VL domain sequences of antibody IMPI-004.

[1944] A106. The antibody according to clause A91 or clause A92, wherein the antibody comprises the VH domain and VL domain sequences of antibody IMPI-047.

[1945] A107. The antibody according to clause A91 or clause A92, wherein the antibody comprises the VH domain and VL domain sequences of antibody IMPI-017.

[1946] A108. The antibody according to clause A91 or clause A92, wherein the antibody comprises the VH domain and VL domain sequences of antibody IMPI-059.

[1947] A109. The antibody according to clause A91 or clause A92, wherein the antibody comprises the VH domain and VL domain sequences of antibody IMPI-028.

[1948] A110. The antibody according to any one of clauses A1 to A4, comprising VH and/or VL domain framework regions of human germline gene segment sequences.

[1949] A111. The antibody according to any one of clauses A1 to A4 or A110, comprising an antibody VH domain which
[1950] i) is derived from recombination of a human heavy chain V gene segment, a human heavy chain D gene segment and a human heavy chain J gene segment, wherein
   [1951] the V gene segment is IGHV3-53*01, IGHV1-8*01 or IGHV3-33*01;
   [1952] and/or
   [1953] the J gene segment is IGHJ6*02, IGHJ4*02 or IGHJ3*02, or
[1954] ii) comprises framework regions FR1, FR2, FR3 and FR4, wherein
   [1955] FR1 aligns with human germline V gene segment IGHV3-53*01, IGHV1-8*01 or IGHV3-33*01 with up to 1, 2, 3, 4, or 5 amino acid alterations,
   [1956] FR2 aligns with human germline V gene segment IGHV3-53*01, IGHV1-8*01 or IGHV3-33*01 with up to 1, 2, 3, 4, or 5 amino acid alterations,
   [1957] FR3 aligns with human germline V gene segment IGHV3-53*01, IGHV1-8*01 or IGHV3-33*01 with up to 1, 2, 3, 4 or 5 amino acid alterations, and/or
   [1958] FR4 aligns with human germline J gene segment IGHJ6*02, IGHJ4*02 or IGHJ3*02 with up to 1, 2, 3, 4 or 5 amino acid alterations.

[1959] A112. The antibody according to any one of clauses A1 to A4, A 110 or A 111, comprising an antibody VH domain which
[1960] i) is derived from recombination of a human heavy chain V gene segment IGHV3-53*01, IGHV1-8*01 or IGHV3-33*01, a human heavy chain D gene segment and a human heavy chain J gene segment, or
[1961] ii) comprises framework regions FR1, FR2, FR3 and FR4, wherein FR1, FR2 and FR3 each align with human germline V segment IGHV3-53*01, IGHV1-8*01 or IGHV3-33*01 with up to 1, 2, 3, 4 or 5 amino acid alterations.

[1962] A113. The antibody according to any one of clauses A1 to A4 or A110 to A112, wherein the J gene segment is IGHJ6*02, IGHJ4*02 or IGHJ3*02, or wherein the VH domain framework region FR4 aligns with human germline J gene segment IGHJ6*02, IGHJ4*02 or IGHJ3*02 with 1, 2, 3, 4 or 5 amino acid alterations.

[1963] A114. The antibody according to any one of clauses A1 to A4 or A110, comprising an antibody VL domain which
[1964] i) is derived from recombination of a human light chain V gene segment and a human light chain J gene segment, wherein
   [1965] the V gene segment is IGKV1-9*d01, IGKV6-21*01, IGKV1-33*01 or IGKV3-20*01, and/or
   [1966] the J gene segment is IGKJ5*01, IGKJ4*01, IGKJ3*01, IGKJ2*04 or IGKJ1*01; or
[1967] ii) comprises framework regions FR1, FR2, FR3 and FR4, wherein
   [1968] FR1 aligns with human germline V gene segment IGKV1-9*d01, IGKV6-21*01, IGKV1-33*01 or IGKV3-20*01 with up to 1, 2, 3, 4, or 5 amino acid alterations,
   [1969] FR2 aligns with human germline V gene segment IGKV1-9*d01, IGKV6-21*01, IGKV1-33*01 or IGKV3-20*01 with up to 1, 2, 3, 4, or 5 amino acid alterations
   [1970] FR3 aligns with human germline V gene segment IGKV1-9*d01, IGKV6-21*01, IGKV1-33*01 or IGKV3-20*01 with up to 1, 2, 3, 4 or 5 amino acid alterations, and/or
   [1971] FR4 aligns with human germline J gene segment IGKJ5*01, IGKJ4*01, IGKJ3*01, IGKJ2*04 or IGKJ1*01 with up to 1, 2, 3, 4 or 5 amino acid alterations.

[1972] A115. The antibody according to any one of clauses A1 to A4 or A110, comprising an antibody VL domain derived from recombination of a human light chain V gene segment and a human light chain J gene segment, wherein:
[1973] the V gene segment is IGKV1-9*d01, IGKV6-21*01, IGKV1-33*01 or IGKV3-20*01, and optionally
[1974] the J gene segment is IGKJ5*01, IGKJ4*01, IGKJ3*01, IGKJ2*04 or IGKJ1*01.

[1975] B1. An antibody that preferentially binds to the trimer form of the SARS-CoV-2 spike protein over the isolated RBD domain, isolated S1 subunit or isolated S2 subunit of the SARS-CoV-2 spike protein.

[1976] B2. An antibody according to clause B1, wherein the antibody specifically binds to the trimer form of the SARS-CoV-2 spike protein and does not bind to the isolated RBD domain.

[1977] B3. An antibody according to clause B1 or clause B2, wherein the antibody specifically binds to the trimer form of the SARS-CoV-2 spike protein and does not bind to the isolated RBD domain, isolated S1 subunit or isolated S2 subunit of the SARS-CoV-2 spike protein.

[1978] B4. An antibody according to any one of clauses B1 to B3, wherein the antibody neutralises SARS-CoV-2 with an IC50 of 75 nM or lower, preferably 15 nM or lower (e.g. as measured in a pseudovirus neutralisation assay).

[1979] B5. An antibody according to any one of clauses B1 to B4,
[1980] wherein the antibody comprises a variable heavy (VH) domain sequence comprising complementarity determining regions (CDRs) HCDR1, HCDR2 and HCDR3, and a variable light (VL) domain sequence comprising complementarity determining regions LCDR1, LCDR2 and LCDR3,
[1981] wherein the HCDR3 is the HCDR3 of antibody IMPI-030, IMPI-053, IMPI-025, IMPI-040, IMPI-007, IMPI-020, IMPI-032, IMPI-023, IMPI-039, IMPI-001, IMPI-019, IMPI-010, IMPI-008, IMPI-031, IMPI-057, IMPI-022, IMPI-035, IMPI-067 or IMPI-072.

[1982] B6. The antibody according to clause B5, wherein the HCDR3 is the HCDR3 of antibody IMPI-030.

[1983] B7. The antibody according to clause B5, wherein the HCDR3 is the HCDR3 of antibody IMPI-053.

[1984] B8. The antibody according to clause B5, wherein the HCDR3 is the HCDR3 of antibody IMPI-025.

[1985] B9. The antibody according to clause B5, wherein the HCDR3 is the HCDR3 of antibody IMPI-040.

[1986] B10. The antibody according to clause B5, wherein the HCDR3 is the HCDR3 of antibody IMPI-007.

[1987] B 11. The antibody according to clause B5, wherein the HCDR3 is the HCDR3 of antibody IMPI-020.

[1988] B12. The antibody according to clause B5, wherein the HCDR3 is the HCDR3 of antibody IMPI-032.

[1989] B13. The antibody according to clause B5, wherein the HCDR3 is the HCDR3 of antibody IMPI-023.

[1990] B14. The antibody according to clause B5, wherein the HCDR3 is the HCDR3 of antibody IMPI-039.

[1991] B15. The antibody according to clause B5, wherein the HCDR3 is the HCDR3 of antibody IMPI-001.

[1992] B16. The antibody according to clause B5, wherein the HCDR3 is the HCDR3 of antibody IMPI-019.

[1993] B17. The antibody according to clause B5, wherein the HCDR3 is the HCDR3 of antibody IMPI-010.

[1994] B18. The antibody according to clause B5, wherein the HCDR3 is the HCDR3 of antibody IMPI-008.

[1995] B19. The antibody according to clause B5, wherein the HCDR3 is the HCDR3 of antibody IMPI-031.

[1996] B20. The antibody according to clause B5, wherein the HCDR3 is the HCDR3 of antibody IMPI-057.

[1997] B21. The antibody according to clause B5, wherein the HCDR3 is the HCDR3 of antibody IMPI-022.

[1998] B22. The antibody according to clause B5, wherein the HCDR3 is the HCDR3 of antibody IMPI-035.

[1999] B23. The antibody according to clause B5, wherein the HCDR3 is the HCDR3 of antibody IMPI-067.

[2000] B24. The antibody according to clause B5, wherein the HCDR3 is the HCDR3 of antibody IMPI-072.

[2001] B25. An anti-SARS-CoV-2 antibody,
[2002] wherein the antibody comprises a variable heavy (VH) domain sequence comprising complementarity determining regions (CDRs) HCDR1, HCDR2, and HCDR3, and a variable light (VL) domain sequence comprising complementarity determining regions LCDR1, LCDR2 and LCDR3,
[2003] wherein the CDRs are those of antibody IMPI-030, IMPI-053, IMPI-025, IMPI-040, IMPI-007, IMPI-020, IMPI-032, IMPI-023, IMPI-039, IMPI-001, IMPI-019, IMPI-010, IMPI-008, IMPI-031, IMPI-057, IMPI-022, IMPI-035, IMPI-067 or IMPI-072.

[2004] B26. An antibody according to any one of clauses B1 to B4,
[2005] wherein the antibody comprises a variable heavy (VH) domain sequence comprising complementarity determining regions (CDRs) HCDR1, HCDR2, and HCDR3, and a variable light (VL) domain sequence comprising complementarity determining regions LCDR1, LCDR2 and LCDR3,
[2006] wherein the CDRs are those of antibody IMPI-030, IMPI-053, IMPI-025, IMPI-040, IMPI-007, IMPI-020, IMPI-032, IMPI-023, IMPI-039, IMPI-001, IMPI-019, IMPI-010, IMPI-008, IMPI-031, IMPI-057, IMPI-022, IMPI-035, IMPI-067 or IMPI-072.

[2007] B27. The antibody according to clause B25 or clause B26, wherein the antibody has the CDRs of antibody IMPI-030.

[2008] B28. The antibody according to clause B25 or clause B26, wherein the antibody has the CDRs of antibody IMPI-053.

[2009] B29. The antibody according to clause B25 or clause B26, wherein the antibody has the CDRs of antibody IMPI-025.

[2010] B30. The antibody according to clause B25 or clause B26, wherein the antibody has the CDRs of antibody IMPI-040.

[2011] B31. The antibody according to clause B25 or clause B26, wherein the antibody has the CDRs of antibody IMPI-007.

[2012] B32. The antibody according to clause B25 or clause B26, wherein the antibody has the CDRs of antibody IMPI-020.

[2013] B33. The antibody according to clause B25 or clause B26, wherein the antibody has the CDRs of antibody IMPI-032.

[2014] B34. The antibody according to clause B25 or clause B26, wherein the antibody has the CDRs of antibody IMPI-023.

[2015] B35. The antibody according to clause B25 or clause B26, wherein the antibody has the CDRs of antibody IMPI-039.

[2016] B36. The antibody according to clause B25 or clause B26, wherein the antibody has the CDRs of antibody IMPI-001.

[2017] B37. The antibody according to clause B25 or clause B26, wherein the antibody has the CDRs of antibody IMPI-019.

[2018] B38. The antibody according to clause B25 or clause B26, wherein the antibody has the CDRs of antibody IMPI-010.

[2019] B39. The antibody according to clause B25 or clause B26, wherein the antibody has the CDRs of antibody IMPI-008.

[2020] B40. The antibody according to clause B25 or clause B26, wherein the antibody has the CDRs of antibody IMPI-031.

[2021] B41. The antibody according to clause B25 or clause B26, wherein the antibody has the CDRs of antibody IMPI-057.

[2022] B42. The antibody according to clause B25 or clause B26, wherein the antibody has the CDRs of antibody IMPI-022.

[2023] B43. The antibody according to clause B25 or clause B26, wherein the antibody has the CDRs of antibody IMPI-035.

[2024] B44. The antibody according to clause B25 or clause B26, wherein the antibody has the CDRs of antibody IMPI-067.

[2025] B45. The antibody according to clause B25 or clause B26, wherein the antibody has the CDRs of antibody IMPI-072.

[2026] B46. An antibody according to any one of clauses B1 to B4,
[2027] wherein the antibody comprises a variable heavy (VH) domain sequence and a variable light (VL) domain sequence and wherein the variable heavy (VH) domain and variable light (VL) domain sequences respectively comprise the variable heavy (VH) domain and variable light (VL) domain sequences of antibody IMPI-030, IMPI-053, IMPI-025, IMPI-040, IMPI-007, IMPI-020, IMPI-032, IMPI-023, IMPI-039, IMPI-001, IMPI-019, IMPI-010, IMPI-008, IMPI-031, IMPI-057, IMPI-022, IMPI-035, IMPI-067 or IMPI-072,
[2028] optionally with 1, 2, 3, 4 or 5 amino acid alterations outside the complementarity determining regions (CDRs) in the variable heavy (VH) domain sequence and optionally with 1, 2, 3, 4 or 5 amino acid alterations outside the complementarity determining regions (CDRs) in the variable light (VL) domain sequence.

[2029] B47. The antibody according to clause B46, wherein the antibody comprises a variable heavy (VH) domain sequence of antibody IMPI-030, optionally with 1, 2, 3, 4 or 5 amino acid alterations outside the complementarity determining regions (CDRs), and a variable light (VL) domain sequence of antibody IMPI-030, optionally with 1, 2, 3, 4 or 5 amino acid alterations outside the complementarity determining regions (CDRs).

[2030] B48. The antibody according to clause B46, wherein the antibody comprises a variable heavy (VH) domain sequence of antibody IMPI-053, optionally with 1, 2, 3, 4 or 5 amino acid alterations outside the complementarity determining regions (CDRs), and a variable light (VL) domain sequence of antibody IMPI-053, optionally with 1, 2, 3, 4 or 5 amino acid alterations outside the complementarity determining regions (CDRs).

[2031] B49. The antibody according to clause B46, wherein the antibody comprises a variable heavy (VH) domain sequence of antibody IMPI-025, optionally with 1, 2, 3, 4 or 5 amino acid alterations outside the complementarity determining regions (CDRs), and a variable light (VL) domain sequence of antibody IMPI-025, optionally with 1, 2, 3, 4 or 5 amino acid alterations outside the complementarity determining regions (CDRs).

[2032] B50. The antibody according to clause B46, wherein the antibody comprises a variable heavy (VH) domain sequence of antibody IMPI-040, optionally with 1, 2, 3, 4 or 5 amino acid alterations outside the complementarity determining regions (CDRs), and a variable light (VL) domain sequence of antibody IMPI-040, optionally with 1, 2, 3, 4 or 5 amino acid alterations outside the complementarity determining regions (CDRs).

[2033] B51. The antibody according to clause B46, wherein the antibody comprises a variable heavy (VH) domain sequence of antibody IMPI-007, optionally with 1, 2, 3, 4 or 5 amino acid alterations outside the complementarity determining regions (CDRs), and a variable light (VL) domain sequence of antibody IMPI-007, optionally with 1, 2, 3, 4 or 5 amino acid alterations outside the complementarity determining regions (CDRs).

[2034] B52. The antibody according to clause B46, wherein the antibody comprises a variable heavy (VH) domain sequence of antibody IMPI-020, optionally with 1, 2, 3, 4 or 5 amino acid alterations outside the complementarity determining regions (CDRs), and a variable light (VL) domain sequence of antibody IMPI-020, optionally with 1, 2, 3, 4 or 5 amino acid alterations outside the complementarity determining regions (CDRs).

[2035] B53. The antibody according to clause B46, wherein the antibody comprises a variable heavy (VH) domain sequence of antibody IMPI-032, optionally with 1, 2, 3, 4 or 5 amino acid alterations outside the complementarity determining regions (CDRs), and a variable light (VL) domain sequence of antibody IMPI-032, optionally with 1, 2, 3, 4 or 5 amino acid alterations outside the complementarity determining regions (CDRs).

[2036] B54. The antibody according to clause B46, wherein the antibody comprises a variable heavy (VH) domain sequence of antibody IMPI-023, optionally with 1, 2, 3, 4 or 5 amino acid alterations outside the complementarity determining regions (CDRs), and a variable light (VL) domain sequence of antibody IMPI-023, optionally with 1, 2, 3, 4 or 5 amino acid alterations outside the complementarity determining regions (CDRs).

[2037] B55. The antibody according to clause B46, wherein the antibody comprises a variable heavy (VH) domain sequence of antibody IMPI-039, optionally with 1, 2, 3, 4 or 5 amino acid alterations outside the complementarity determining regions (CDRs), and a variable light (VL) domain sequence of antibody IMPI-039, optionally with 1, 2, 3, 4 or 5 amino acid alterations outside the complementarity determining regions (CDRs).

[2038] B56. The antibody according to clause B46, wherein the antibody comprises a variable heavy (VH) domain sequence of antibody IMPI-001, optionally with 1, 2, 3, 4 or 5 amino acid alterations outside the complementarity determining regions (CDRs), and a variable light (VL) domain sequence of antibody IMPI-001, optionally with 1, 2, 3, 4 or 5 amino acid alterations outside the complementarity determining regions (CDRs).

[2039] B57. The antibody according to clause B46, wherein the antibody comprises a variable heavy (VH) domain sequence of antibody IMPI-019, optionally with 1, 2, 3, 4 or 5 amino acid alterations outside the complementarity determining regions (CDRs), and a variable light (VL) domain sequence of antibody IMPI-019, optionally with 1, 2, 3, 4 or 5 amino acid alterations outside the complementarity determining regions (CDRs).

[2040] B58. The antibody according to clause B46, wherein the antibody comprises a variable heavy (VH) domain sequence of antibody IMPI-010, optionally with 1, 2, 3, 4 or 5 amino acid alterations outside the complementarity determining regions (CDRs), and a variable light (VL) domain sequence of antibody IMPI-010, optionally with 1, 2, 3, 4 or 5 amino acid alterations outside the complementarity determining regions (CDRs).

[2041] B59. The antibody according to clause B46, wherein the antibody comprises a variable heavy (VH) domain sequence of antibody IMPI-008, optionally with 1, 2, 3, 4 or 5 amino acid alterations outside the complementarity determining regions (CDRs), and a variable light (VL) domain sequence of antibody IMPI-008, optionally with 1, 2, 3, 4 or 5 amino acid alterations outside the complementarity determining regions (CDRs).

[2042] B60. The antibody according to clause B46, wherein the antibody comprises a variable heavy (VH) domain sequence of antibody IMPI-031, optionally with 1, 2, 3, 4 or 5 amino acid alterations outside the complementarity determining regions (CDRs), and a variable light (VL) domain sequence of antibody IMPI-031, optionally with 1, 2, 3, 4 or 5 amino acid alterations outside the complementarity determining regions (CDRs).

[2043] B61. The antibody according to clause B46, wherein the antibody comprises a variable heavy (VH) domain sequence of antibody IMPI-057, optionally with 1, 2, 3, 4 or 5 amino acid alterations outside the complementarity determining regions (CDRs), and a variable light (VL) domain sequence of antibody IMPI-057, optionally with 1, 2, 3, 4 or 5 amino acid alterations outside the complementarity determining regions (CDRs).

[2044] B62. The antibody according to clause B46, wherein the antibody comprises a variable heavy (VH) domain sequence of antibody IMPI-022, optionally with 1, 2, 3, 4 or 5 amino acid alterations outside the complementarity determining regions (CDRs), and a variable light (VL) domain sequence of antibody IMPI-022, optionally with 1, 2, 3, 4 or 5 amino acid alterations outside the complementarity determining regions (CDRs).

[2045] B63. The antibody according to clause B46, wherein the antibody comprises a variable heavy (VH) domain sequence of antibody IMPI-035, optionally with 1, 2, 3, 4 or 5 amino acid alterations outside the complementarity determining regions (CDRs), and a variable light (VL) domain sequence of antibody IMPI-035, optionally with 1, 2, 3, 4 or 5 amino acid alterations outside the complementarity determining regions (CDRs).

[2046] B64. The antibody according to clause B46, wherein the antibody comprises a variable heavy (VH) domain sequence of antibody IMPI-067, optionally with 1, 2, 3, 4 or 5 amino acid alterations outside the complementarity determining regions (CDRs), and a variable light (VL) domain sequence of antibody IMPI-067, optionally with 1, 2, 3, 4 or 5 amino acid alterations outside the complementarity determining regions (CDRs).

[2047] B65. The antibody according to clause B46, wherein the antibody comprises a variable heavy (VH) domain sequence of antibody IMPI-072, optionally with 1, 2, 3, 4 or 5 amino acid alterations outside the complementarity determining regions (CDRs), and a variable light (VL) domain sequence of antibody IMPI-072, optionally with 1, 2, 3, 4 or 5 amino acid alterations outside the complementarity determining regions (CDRs).

[2048] B66. An antibody according to any one of clauses B1 to B4, wherein the antibody comprises a variable heavy (VH) domain sequence and a variable light (VL) domain sequence and wherein the variable heavy (VH) domain and variable light (VL) domain sequences respectively comprise a sequence having at least 90% identity to the variable heavy (VH) and variable light (VL) domain sequences of antibody IMPI-030, IMPI-053, IMPI-025, IMPI-040, IMPI-007, IMPI-020, IMPI-032, IMPI-023, IMPI-039, IMPI-001, IMPI-019, IMPI-010, IMPI-008, IMPI-031, IMPI-057, IMPI-022, IMPI-035, IMPI-067 or IMPI-072, provided that the antibody has the CDRs of antibody IMPI-030, IMPI-053, IMPI-025, IMPI-040, IMPI-007, IMPI-020, IMPI-032, IMPI-023, IMPI-039, IMPI-001, IMPI-019, IMPI-010, IMPI-008, IMPI-031, IMPI-057, IMPI-022, IMPI-035, IMPI-067 or IMPI-072.

[2049] B67. The antibody according to clause B66, wherein the variable heavy (VH) domain sequence comprises a sequence having at least 90% identity to the VH domain sequence of antibody IMPI-030 and the variable light (VL) domain sequence comprises a sequence having at least 90% identity to the VL domain sequence of antibody IMPI-030, provided that the antibody has the CDRs of antibody IMPI-030.

[2050] B68. The antibody according to clause B66, wherein the variable heavy (VH) domain sequence comprises a sequence having at least 90% identity to the VH domain sequence of antibody IMPI-053 and the variable light (VL) domain sequence comprises a sequence having at least 90% identity to the VL domain sequence of antibody IMPI-053, provided that the antibody has the CDRs of antibody IMPI-053.

[2051] B69. The antibody according to clause B66, wherein the variable heavy (VH) domain sequence comprises a sequence having at least 90% identity to the VH domain sequence of antibody IMPI-025 and the variable light (VL) domain sequence comprises a sequence having at least 90% identity to the VL domain sequence of antibody IMPI-025, provided that the antibody has the CDRs of antibody IMPI-025.

[2052] B70. The antibody according to clause B66, wherein the variable heavy (VH) domain sequence comprises a sequence having at least 90% identity to the VH domain sequence of antibody IMPI-040 and the variable light (VL) domain sequence comprises a sequence having at least 90% identity to the VL domain sequence of antibody IMPI-040, provided that the antibody has the CDRs of antibody IMPI-040.

[2053] B71. The antibody according to clause B66, wherein the variable heavy (VH) domain sequence comprises a sequence having at least 90% identity to the VH domain sequence of antibody IMPI-007 and the variable light (VL) domain sequence comprises a sequence having at least 90% identity to the VL domain sequence of antibody IMPI-007, provided that the antibody has the CDRs of antibody IMPI-007.

[2054] B72. The antibody according to clause B66, wherein the variable heavy (VH) domain sequence comprises a sequence having at least 90% identity to the VH domain sequence of antibody IMPI-020 and the variable light (VL) domain sequence comprises a sequence having at least 90% identity to the VL domain sequence of antibody IMPI-020, provided that the antibody has the CDRs of antibody IMPI-020.

[2055] B73. The antibody according to clause B66, wherein the variable heavy (VH) domain sequence comprises a sequence having at least 90% identity to the VH domain sequence of antibody IMPI-032 and the variable light (VL) domain sequence comprises a sequence having at least 90% identity to the VL domain sequence of antibody IMPI-032, provided that the antibody has the CDRs of antibody IMPI-032.

[2056] B74. The antibody according to clause B66, wherein the variable heavy (VH) domain sequence comprises a sequence having at least 90% identity to the VH domain sequence of antibody IMPI-023 and the variable light (VL) domain sequence comprises a sequence having at least 90% identity to the VL domain sequence of antibody IMPI-023, provided that the antibody has the CDRs of antibody IMPI-023.

[2057] B75. The antibody according to clause B66, wherein the variable heavy (VH) domain sequence comprises a sequence having at least 90% identity to the VH domain sequence of antibody IMPI-039 and the variable light (VL) domain sequence comprises a sequence having at least 90% identity to the VL domain sequence of antibody IMPI-039, provided that the antibody has the CDRs of antibody IMPI-039.

[2058] B76. The antibody according to clause B66, wherein the variable heavy (VH) domain sequence comprises a sequence having at least 90% identity to the VH domain sequence of antibody IMPI-001 and the variable light (VL) domain sequence comprises a sequence having at least 90% identity to the VL domain sequence of antibody IMPI-001, provided that the antibody has the CDRs of antibody IMPI-001.

[2059] B77. The antibody according to clause B66, wherein the variable heavy (VH) domain sequence comprises a sequence having at least 90% identity to the VH domain sequence of antibody IMPI-019 and the variable light (VL) domain sequence comprises a sequence having at least 90% identity to the VL domain sequence of antibody IMPI-019, provided that the antibody has the CDRs of antibody IMPI-019.

[2060] B78. The antibody according to clause B66, wherein the variable heavy (VH) domain sequence comprises a sequence having at least 90% identity to the VH domain sequence of antibody IMPI-010 and the variable light (VL) domain sequence comprises a sequence having at least 90% identity to the VL domain sequence of antibody IMPI-010, provided that the antibody has the CDRs of antibody IMPI-010.

[2061] B79. The antibody according to clause B66, wherein the variable heavy (VH) domain sequence comprises a sequence having at least 90% identity to the VH domain sequence of antibody IMPI-008 and the variable light (VL) domain sequence comprises a sequence having at least 90% identity to the VL domain sequence of antibody IMPI-008, provided that the antibody has the CDRs of antibody IMPI-008.

[2062] B80. The antibody according to clause B66, wherein the variable heavy (VH) domain sequence comprises a sequence having at least 90% identity to the VH domain sequence of antibody IMPI-031 and the variable light (VL) domain sequence comprises a sequence having at least 90% identity to the VL domain sequence of antibody IMPI-031, provided that the antibody has the CDRs of antibody IMPI-031.

[2063] B81. The antibody according to clause B66, wherein the variable heavy (VH) domain sequence comprises a sequence having at least 90% identity to the VH domain sequence of antibody IMPI-057 and the variable light (VL) domain sequence comprises a sequence having at least 90% identity to the VL domain sequence of antibody IMPI-057, provided that the antibody has the CDRs of antibody IMPI-057.

[2064] B82. The antibody according to clause B66, wherein the variable heavy (VH) domain sequence comprises a sequence having at least 90% identity to the VH domain sequence of antibody IMPI-022 and the variable light (VL) domain sequence comprises a sequence having at least 90% identity to the VL domain sequence of antibody IMPI-022, provided that the antibody has the CDRs of antibody IMPI-022.

[2065] B83. The antibody according to clause B66, wherein the variable heavy (VH) domain sequence comprises a sequence having at least 90% identity to the VH domain sequence of antibody IMPI-035 and the variable light (VL) domain sequence comprises a sequence having at least 90% identity to the VL domain sequence of antibody IMPI-035, provided that the antibody has the CDRs of antibody IMPI-035.

[2066] B84. The antibody according to clause B66, wherein the variable heavy (VH) domain sequence comprises a sequence having at least 90% identity to the VH domain sequence of antibody IMPI-067 and the variable light (VL) domain sequence comprises a sequence having at least 90% identity to the VL domain sequence of antibody IMPI-067, provided that the antibody has the CDRs of antibody IMPI-067.

[2067] B85. The antibody according to clause B66, wherein the variable heavy (VH) domain sequence comprises a sequence having at least 90% identity to the VH domain sequence of antibody IMPI-072 and the variable light (VL) domain sequence comprises a sequence having at least 90% identity to the VL domain sequence of antibody IMPI-072, provided that the antibody has the CDRs of antibody IMPI-072.

[2068] B86. An antibody according to any one of clauses B1 to B4, wherein the antibody comprises a variable heavy (VH) domain sequence and a variable light (VL) domain sequence and wherein the variable heavy (VH) domain and variable light (VL) domain sequences respectively comprise the variable heavy (VH) and variable light (VL) domain sequences of antibody IMPI-030, IMPI-053, IMPI-025, IMPI-040, IMPI-007, IMPI-020, IMPI-032, IMPI-023, IMPI-039, IMPI-001, IMPI-019, IMPI-010, IMPI-008, IMPI-031, IMPI-057, IMPI-022, IMPI-035, IMPI-067 or IMPI-072.

[2069] B87. An anti-SARS-CoV-2 antibody, wherein the antibody comprises a variable heavy (VH) domain sequence and a variable light (VL) domain sequence and wherein the variable heavy (VH) domain and variable light (VL) domain sequences respectively comprise the variable heavy (VH) and variable light (VL) domain sequences of antibody IMPI-030, IMPI-053, IMPI-025, IMPI-040, IMPI-007, IMPI-020, IMPI-032, IMPI-023, IMPI-039, IMPI-001, IMPI-019, IMPI-010, IMPI-008, IMPI-031, IMPI-057, IMPI-022, IMPI-035, IMPI-067 or IMPI-072.

[2070] B88. The antibody according to clause B86 or B87, wherein the variable heavy (VH) domain sequence comprises the VH domain sequence of antibody IMPI-030 and the variable light (VL) domain sequence comprises the VL domain sequence of antibody IMPI-030.

[2071] B89. The antibody according to clause B86 or B87, wherein the variable heavy (VH) domain sequence comprises the VH domain sequence of antibody IMPI-053 and the variable light (VL) domain sequence comprises the VL domain sequence of antibody IMPI-053.

[2072] B90. The antibody according to clause B86 or B87, wherein the variable heavy (VH) domain sequence comprises the VH domain sequence of antibody IMPI-025 and the variable light (VL) domain sequence comprises the VL domain sequence of antibody IMPI-025.

[2073] B91. The antibody according to clause B86 or B87, wherein the variable heavy (VH) domain sequence comprises the VH domain sequence of antibody IMPI-040 and the variable light (VL) domain sequence comprises the VL domain sequence of antibody IMPI-040.

[2074] B92. The antibody according to clause B86 or B87, wherein the variable heavy (VH) domain sequence comprises the VH domain sequence of antibody IMPI-007 and the variable light (VL) domain sequence comprises the VL domain sequence of antibody IMPI-007.

[2075] B93. The antibody according to clause B86 or B87, wherein the variable heavy (VH) domain sequence comprises the VH domain sequence of antibody IMPI-020 and the variable light (VL) domain sequence comprises the VL domain sequence of antibody IMPI-020.

[2076] B94. The antibody according to clause B86 or B87, wherein the variable heavy (VH) domain sequence comprises the VH domain sequence of antibody IMPI-032 and the variable light (VL) domain sequence comprises the VL domain sequence of antibody IMPI-032.

[2077] B95. The antibody according to clause B86 or B87, wherein the variable heavy (VH) domain sequence comprises the VH domain sequence of antibody IMPI-023 and the variable light (VL) domain sequence comprises the VL domain sequence of antibody IMPI-023.

[2078] B96. The antibody according to clause B86 or B87, wherein the variable heavy (VH) domain sequence comprises the VH domain sequence of antibody IMPI-039 and the variable light (VL) domain sequence comprises the VL domain sequence of antibody IMPI-039.

[2079] B97. The antibody according to clause B86 or B87, wherein the variable heavy (VH) domain sequence comprises the VH domain sequence of antibody IMPI-001 and the variable light (VL) domain sequence comprises the VL domain sequence of antibody IMPI-001.

[2080] B98. The antibody according to clause B86 or B87, wherein the variable heavy (VH) domain sequence comprises the VH domain sequence of antibody IMPI-019 and the variable light (VL) domain sequence comprises the VL domain sequence of antibody IMPI-019.

[2081] B99. The antibody according to clause B86 or B87, wherein the variable heavy (VH) domain sequence comprises the VH domain sequence of antibody IMPI-010 and the variable light (VL) domain sequence comprises the VL domain sequence of antibody IMPI-010.

[2082] B100. The antibody according to clause B86 or B87, wherein the variable heavy (VH) domain sequence comprises the VH domain sequence of antibody IMPI-008 and the variable light (VL) domain sequence comprises the VL domain sequence of antibody IMPI-008.

[2083] B101. The antibody according to clause B86 or B87, wherein the variable heavy (VH) domain sequence comprises the VH domain sequence of antibody IMPI-031 and the variable light (VL) domain sequence comprises the VL domain sequence of antibody IMPI-031.

[2084] B102. The antibody according to clause B86 or B87, wherein the variable heavy (VH) domain sequence comprises the VH domain sequence of antibody IMPI-057 and the variable light (VL) domain sequence comprises the VL domain sequence of antibody IMPI-057.

[2085] B103. The antibody according to clause B86 or B87, wherein the variable heavy (VH) domain sequence comprises the VH domain sequence of antibody IMPI-022 and the variable light (VL) domain sequence comprises the VL domain sequence of antibody IMPI-022.

[2086] B104. The antibody according to clause B86 or B87, wherein the variable heavy (VH) domain sequence comprises the VH domain sequence of antibody IMPI-035 and the variable light (VL) domain sequence comprises the VL domain sequence of antibody IMPI-035.

[2087] B105. The antibody according to clause B86 or B87, wherein the variable heavy (VH) domain sequence comprises the VH domain sequence of antibody IMPI-067 and the variable light (VL) domain sequence comprises the VL domain sequence of antibody IMPI-067.

[2088] B106. The antibody according to clause B86 or B87, wherein the variable heavy (VH) domain sequence comprises the VH domain sequence of antibody IMPI-072 and the variable light (VL) domain sequence comprises the VL domain sequence of antibody IMPI-072.

[2089] B107. The antibody according to any one of clauses B1 to B4, comprising VH and/or VL domain framework regions of human germline gene segment sequences.

[2090] B108. The antibody according to any one of clauses B1 to B4 or B107, comprising an antibody VH domain which
[2091] i) is derived from recombination of a human heavy chain V gene segment, a human heavy chain D gene segment and a human heavy chain J gene segment, wherein
   [2092] the V gene segment is IGHV4-4*02, IGHV3-9*01 or IGHV3-30*18;
   [2093] and/or
   [2094] the J gene segment is IGHJ4*02 or IGHJ6*02, or
[2095] ii) comprises framework regions FR1, FR2, FR3 and FR4, wherein
   [2096] FR1 aligns with human germline V gene segment IGHV4-4*02, IGHV3-9*01 or IGHV3-30*18 with up to 1, 2, 3, 4, or 5 amino acid alterations,
   [2097] FR2 aligns with human germline V gene segment IGHV4-4*02, IGHV3-9*01 or IGHV3-30*18 with up to 1, 2, 3, 4, or 5 amino acid alterations,
   [2098] FR3 aligns with human germline V gene segment IGHV4-4*02, IGHV3-9*01 or IGHV3-30*18 with up to 1, 2, 3, 4 or 5 amino acid alterations, and/or
   [2099] FR4 aligns with human germline J gene segment IGHJ4*02 or IGHJ6*02 with up to 1, 2, 3, 4 or 5 amino acid alterations.

[2100] B109. The antibody according to anyone of clauses B1 to B4, B107 or B108, comprising an antibody VH domain which
[2101] i) is derived from recombination of a human heavy chain V gene segment IGHV4-4*02, IGHV3-9*01 or IGHV3-30*18, a human heavy chain D gene segment and a human heavy chain J gene segment, or
[2102] ii) comprises framework regions FR1, FR2, FR3 and FR4, wherein FR1, FR2 and FR3 each align with human germline V segment IGHV4-4*02, IGHV3-9*01 or IGHV3-30*18 with up to 1, 2, 3, 4 or 5 amino acid alterations.

[2103] B110. The antibody according to any one of clauses B1 to B4 or B107 to B109, wherein the J gene segment is IGHJ4*02 or IGHJ6*02, or wherein the VH domain framework region FR4 aligns with human germline J gene segment IGHJ4*02 or IGHJ6*02 with 1, 2, 3, 4 or 5 amino acid alterations.

[2104] B111. The antibody according to any one of clauses B1 to B4 or B107, comprising an antibody VL domain which
[2105] i) is derived from recombination of a human light chain V gene segment and a human light chain J gene segment, wherein
   [2106] the V gene segment is IGKV2D-30*01, IGKVID-13*d01 or IGKV3-20*01, and/or
   [2107] the J gene segment is IGKJ4*01 or
[2108] ii) comprises framework regions FR1, FR2, FR3 and FR4, wherein
   [2109] FR1 aligns with human germline V gene segment IGKV2D-30*01, IGKVID-13*d01 or IGKV3-20*01 with up to 1, 2, 3, 4, or 5 amino acid alterations,
   [2110] FR2 aligns with human germline V gene segment IGKV2D-30*01, IGKVID-13*d01 or IGKV3-20*01 with up to 1, 2, 3, 4, or 5 amino acid alterations
   [2111] FR3 aligns with human germline V gene segment IGKV2D-30*01, IGKVID-13*d01 or IGKV3-20*01 with up to 1, 2, 3, 4 or 5 amino acid alterations, and/or
   [2112] FR4 aligns with human germline J gene segment IGKJ4*01 with up to 1, 2, 3, 4 or 5 amino acid alterations.

[2113] B112. The antibody according to any one of clauses B1 to B4 or B107, comprising an antibody VL domain derived from recombination of a human light chain V gene segment and a human light chain J gene segment, wherein:
[2114] the V gene segment is IGKV2D-30*01, IGKVID-13*d01 or IGKV3-20*01, and optionally
[2115] the J gene segment is IGKJ4*01.

[2116] C1. A neutralising antibody that specifically binds to the S2 subunit of the SARS-CoV-2 spike protein.

[2117] C2. An antibody according to clause C1,
[2118] wherein the antibody comprises a variable heavy (VH) domain sequence comprising complementarity determining regions (CDRs) HCDR1, HCDR2 and HCDR3, and a variable light (VL) domain sequence comprising complementarity determining regions LCDR1, LCDR2 and LCDR3,
[2119] wherein the HCDR3 is the HCDR3 of antibody IMPI-003, IMPI-013, IMPI-063, IMPI-061, IMPI-062, IMPI-064, IMPI-065, IMPI-066, IMPI-069, IMPI-070 or IMPI-071.

[2120] C3. The antibody according to clause C2, wherein the HCDR3 is the HCDR3 of antibody IMPI-003.

[2121] C4. The antibody according to clause C2, wherein the HCDR3 is the HCDR3 of antibody IMPI-013.

[2122] C5. The antibody according to clause C2, wherein the HCDR3 is the HCDR3 of antibody IMPI-063.

[2123] C6. The antibody according to clause C2, wherein the HCDR3 is the HCDR3 of antibody IMPI-061.

[2124] C7. The antibody according to clause C2, wherein the HCDR3 is the HCDR3 of antibody IMPI-062.

[2125] C8. The antibody according to clause C2, wherein the HCDR3 is the HCDR3 of antibody IMPI-064.

[2126] C9. The antibody according to clause C2, wherein the HCDR3 is the HCDR3 of antibody IMPI-065.

[2127] C10. The antibody according to clause C2, wherein the HCDR3 is the HCDR3 of antibody IMPI-066.

[2128] C11. The antibody according to clause C2, wherein the HCDR3 is the HCDR3 of antibody IMPI-069.

[2129] C12. The antibody according to clause C2, wherein the HCDR3 is the HCDR3 of antibody IMPI-070.

[2130] C13. The antibody according to clause C2, wherein the HCDR3 is the HCDR3 of antibody IMPI-071.

[2131] C14. An anti-SARS-CoV-2 antibody,
[2132] wherein the antibody comprises a variable heavy (VH) domain sequence comprising complementarity determining regions (CDRs) HCDR1, HCDR2, and HCDR3, and a variable light (VL) domain sequence comprising complementarity determining regions LCDR1, LCDR2 and LCDR3,
[2133] wherein the CDRs are those of antibody IMPI-003, IMPI-013, IMPI-063, IMPI-061, IMPI-062, IMPI-064, IMPI-065, IMPI-066, IMPI-069, IMPI-070 or IMPI-071.

[2134] C15. An antibody according to clause C1,
[2135] wherein the antibody comprises a variable heavy (VH) domain sequence comprising complementarity determining regions (CDRs) HCDR1, HCDR2, and HCDR3, and a variable light (VL) domain sequence comprising complementarity determining regions LCDR1, LCDR2 and LCDR3,
[2136] wherein the CDRs are those of antibody IMPI-003, IMPI-013, IMPI-063, IMPI-061, IMPI-062, IMPI-064, IMPI-065, IMPI-066, IMPI-069, IMPI-070 or IMPI-071.

[2137] C16. The antibody according to clause C14 or clause C15, wherein the antibody has the CDRs of antibody IMPI-003.

[2138] C17. The antibody according to clause C14 or clause C15, wherein the antibody has the CDRs of antibody IMPI-013.

[2139] C18. The antibody according to clause C14 or clause C15, wherein the antibody has the CDRs of antibody IMPI-063.

[2140] C19. The antibody according to clause C14 or clause C15, wherein the antibody has the CDRs of antibody IMPI-061.

[2141] C20. The antibody according to clause C14 or clause C15, wherein the antibody has the CDRs of antibody IMPI-062.

[2142] C21. The antibody according to clause C14 or clause C15, wherein the antibody has the CDRs of antibody IMPI-064.

[2143] C22. The antibody according to clause C14 or clause C15, wherein the antibody has the CDRs of antibody IMPI-065.

[2144] C23. The antibody according to clause C14 or clause C15, wherein the antibody has the CDRs of antibody IMPI-066.

[2145] C24. The antibody according to clause C14 or clause C15, wherein the antibody has the CDRs of antibody IMPI-069.

[2146] C25. The antibody according to clause C14 or clause C15, wherein the antibody has the CDRs of antibody IMPI-070.

[2147] C26. The antibody according to clause C14 or clause C15, wherein the antibody has the CDRs of antibody IMPI-071.

[2148] C27. An antibody according to clause C1,
[2149] wherein the antibody comprises a variable heavy (VH) domain sequence and a variable light (VL) domain sequence and wherein the variable heavy (VH) domain and variable light (VL) domain sequences respectively comprise the variable heavy (VH) domain and variable light (VL) domain sequences of antibody IMPI-003, IMPI-013, IMPI-063, IMPI-061, IMPI-062, IMPI-064, IMPI-065, IMPI-066, IMPI-069, IMPI-070 or IMPI-071, optionally with 1, 2, 3, 4 or 5 amino acid alterations outside the complementarity determining regions (CDRs) in the variable heavy (VH) domain sequence and optionally with 1, 2, 3, 4 or 5 amino acid alterations outside the complementarity determining regions (CDRs) in the variable light (VL) domain sequence.

[2150] C28. The antibody according to clause C27, wherein the antibody comprises a variable heavy (VH) domain sequence of antibody IMPI-003, optionally with 1, 2, 3, 4 or 5 amino acid alterations outside the complementarity determining regions (CDRs), and a variable light (VL) domain sequence of antibody IMPI-003, optionally with 1, 2, 3, 4 or 5 amino acid alterations outside the complementarity determining regions (CDRs).

[2151] C29. The antibody according to clause C27, wherein the antibody comprises a variable heavy (VH) domain sequence of antibody IMPI-013, optionally with 1, 2, 3, 4 or 5 amino acid alterations outside the complementarity determining regions (CDRs), and a variable light (VL) domain sequence of antibody IMPI-013, optionally with 1, 2, 3, 4 or 5 amino acid alterations outside the complementarity determining regions (CDRs).

[2152] C30. The antibody according to clause C27, wherein the antibody comprises a variable heavy (VH) domain sequence of antibody IMPI-063, optionally with 1, 2, 3, 4 or 5 amino acid alterations outside the complementarity determining regions (CDRs), and a variable light (VL) domain sequence of antibody IMPI-063, optionally with 1, 2, 3, 4 or 5 amino acid alterations outside the complementarity determining regions (CDRs).

[2153] C31. The antibody according to clause C27, wherein the antibody comprises a variable heavy (VH) domain sequence of antibody IMPI-061, optionally with 1, 2, 3, 4 or 5 amino acid alterations outside the complementarity determining regions (CDRs), and a variable light (VL) domain sequence of antibody IMPI-061, optionally with 1, 2, 3, 4 or 5 amino acid alterations outside the complementarity determining regions (CDRs).

[2154] C32. The antibody according to clause C27, wherein the antibody comprises a variable heavy (VH) domain sequence of antibody IMPI-062, optionally with 1, 2, 3, 4 or 5 amino acid alterations outside the complementarity determining regions (CDRs), and a variable light (VL) domain sequence of antibody IMPI-062, optionally with 1, 2, 3, 4 or 5 amino acid alterations outside the complementarity determining regions (CDRs).

[2155] C33. The antibody according to clause C27, wherein the antibody comprises a variable heavy (VH) domain sequence of antibody IMPI-064, optionally with 1, 2, 3, 4 or 5 amino acid alterations outside the complementarity determining regions (CDRs), and a variable light (VL) domain sequence of antibody IMPI-064, optionally with 1, 2, 3, 4 or 5 amino acid alterations outside the complementarity determining regions (CDRs).

[2156] C34. The antibody according to clause C27, wherein the antibody comprises a variable heavy (VH) domain sequence of antibody IMPI-065, optionally with 1, 2, 3, 4 or 5 amino acid alterations outside the complementarity determining regions (CDRs), and a variable light (VL) domain sequence of antibody IMPI-065, optionally with 1, 2, 3, 4 or 5 amino acid alterations outside the complementarity determining regions (CDRs).

[2157] C35. The antibody according to clause C27, wherein the antibody comprises a variable heavy (VH) domain sequence of antibody IMPI-066, optionally with 1, 2, 3, 4 or 5 amino acid alterations outside the complementarity determining regions (CDRs), and a variable light (VL) domain sequence of antibody IMPI-066, optionally with 1, 2, 3, 4 or 5 amino acid alterations outside the complementarity determining regions (CDRs).

[2158] C36. The antibody according to clause C27, wherein the antibody comprises a variable heavy (VH) domain sequence of antibody IMPI-069, optionally with 1, 2, 3, 4 or 5 amino acid alterations outside the complementarity determining regions (CDRs), and a variable light (VL) domain sequence of antibody IMPI-069, optionally with 1, 2, 3, 4 or 5 amino acid alterations outside the complementarity determining regions (CDRs).

[2159] C37. The antibody according to clause C27, wherein the antibody comprises a variable heavy (VH) domain sequence of antibody IMPI-070, optionally with 1, 2, 3, 4 or 5 amino acid alterations outside the complementarity determining regions (CDRs), and a variable light (VL) domain sequence of antibody IMPI-070, optionally with 1, 2, 3, 4 or 5 amino acid alterations outside the complementarity determining regions (CDRs).

[2160] C38. The antibody according to clause C27, wherein the antibody comprises a variable heavy (VH) domain sequence of antibody IMPI-071, optionally with 1, 2, 3, 4 or 5 amino acid alterations outside the complementarity determining regions (CDRs), and a variable light (VL) domain sequence of antibody IMPI-071, optionally with 1, 2, 3, 4 or 5 amino acid alterations outside the complementarity determining regions (CDRs).

[2161] C39. An antibody according to clause C1, wherein the antibody comprises a variable heavy (VH) domain sequence and a variable light (VL) domain sequence and wherein the variable heavy (VH) domain and variable light (VL) domain sequences respectively comprise a sequence having at least 90% identity to the variable heavy (VH) and variable light (VL) domain sequences of antibody IMPI-003, IMPI-013, IMPI-063, IMPI-061, IMPI-062, IMPI-064, IMPI-065, IMPI-066, IMPI-069, IMPI-070 or IMPI-071, provided that the antibody has the CDRs of antibody IMPI-003, IMPI-013, IMPI-063, IMPI-061, IMPI-062, IMPI-064, IMPI-065, IMPI-066, IMPI-069, IMPI-070 or IMPI-071.

[2162] C40. The antibody according to clause C39, wherein the variable heavy (VH) domain sequence comprises a sequence having at least 90% identity to the VH domain sequence of antibody IMPI-003 and the variable light (VL) domain sequence comprises a sequence having at least 90% identity to the VL domain sequence of antibody IMPI-003, provided that the antibody has the CDRs of antibody IMPI-003.

[2163] C41. The antibody according to clause C39, wherein the variable heavy (VH) domain sequence comprises a sequence having at least 90% identity to the VH domain sequence of antibody IMPI-013 and the variable light (VL) domain sequence comprises a sequence having at least 90% identity to the VL domain sequence of antibody IMPI-013, provided that the antibody has the CDRs of antibody IMPI-013.

[2164] C42. The antibody according to clause C39, wherein the variable heavy (VH) domain sequence comprises a sequence having at least 90% identity to the VH domain sequence of antibody IMPI-063 and the variable light (VL) domain sequence comprises a sequence having at least 90% identity to the VL domain sequence of antibody IMPI-063, provided that the antibody has the CDRs of antibody IMPI-063.

[2165] C43. The antibody according to clause C39, wherein the variable heavy (VH) domain sequence comprises a sequence having at least 90% identity to the VH domain sequence of antibody IMPI-061 and the variable light (VL) domain sequence comprises a sequence having at least 90% identity to the VL domain sequence of antibody IMPI-061, provided that the antibody has the CDRs of antibody IMPI-061.

[2166] C44. The antibody according to clause C39, wherein the variable heavy (VH) domain sequence comprises a sequence having at least 90% identity to the VH domain sequence of antibody IMPI-062 and the variable light (VL) domain sequence comprises a sequence having at least 90% identity to the VL domain sequence of antibody IMPI-062, provided that the antibody has the CDRs of antibody IMPI-062.

[2167] C45. The antibody according to clause C39, wherein the variable heavy (VH) domain sequence comprises a sequence having at least 90% identity to the VH domain sequence of antibody IMPI-064 and the variable light (VL) domain sequence comprises a sequence having at least 90% identity to the VL domain sequence of antibody IMPI-064, provided that the antibody has the CDRs of antibody IMPI-064.

[2168] C46. The antibody according to clause C39, wherein the variable heavy (VH) domain sequence comprises a sequence having at least 90% identity to the VH domain sequence of antibody IMPI-065 and the variable light (VL) domain sequence comprises a sequence having at least 90% identity to the VL domain sequence of antibody IMPI-065, provided that the antibody has the CDRs of antibody IMPI-065.

[2169] C47. The antibody according to clause C39, wherein the variable heavy (VH) domain sequence comprises a sequence having at least 90% identity to the VH domain sequence of antibody IMPI-066 and the variable light (VL) domain sequence comprises a sequence having at least 90% identity to the VL domain sequence of antibody IMPI-066, provided that the antibody has the CDRs of antibody IMPI-066.

[2170] C48. The antibody according to clause C39, wherein the variable heavy (VH) domain sequence comprises a sequence having at least 90% identity to the VH domain sequence of antibody IMPI-069 and the variable light (VL) domain sequence comprises a sequence having at least 90% identity to the VL domain sequence of antibody IMPI-069, provided that the antibody has the CDRs of antibody IMPI-069.

[2171] C49. The antibody according to clause C39, wherein the variable heavy (VH) domain sequence comprises a sequence having at least 90% identity to the VH domain sequence of antibody IMPI-070 and the variable light (VL) domain sequence comprises a sequence having at least 90% identity to the VL domain sequence of antibody IMPI-070, provided that the antibody has the CDRs of antibody IMPI-070.

[2172] C50. The antibody according to clause C39, wherein the variable heavy (VH) domain sequence comprises a sequence having at least 90% identity to the VH domain sequence of antibody IMPI-071 and the variable light (VL) domain sequence comprises a sequence having at least 90% identity to the VL domain sequence of antibody IMPI-071, provided that the antibody has the CDRs of antibody IMPI-071.

[2173] C51. An antibody according to clause C1, wherein the antibody comprises a variable heavy (VH) domain sequence and a variable light (VL) domain sequence and wherein the variable heavy (VH) domain and variable light (VL) domain sequences respectively comprise the variable heavy (VH) and variable light (VL) domain sequences of antibody IMPI-003, IMPI-013, IMPI-063, IMPI-061, IMPI-062, IMPI-064, IMPI-065, IMPI-066, IMPI-069, IMPI-070 or IMPI-071.

[2174] C52. An anti-SARS-CoV-2 antibody, wherein the antibody comprises a variable heavy (VH) domain sequence and a variable light (VL) domain sequence and wherein the variable heavy (VH) domain and variable light (VL) domain sequences respectively comprise the variable heavy (VH) and variable light (VL) domain sequences of antibody IMPI-003, IMPI-013, IMPI-063, IMPI-061, IMPI-062, IMPI-064, IMPI-065, IMPI-066, IMPI-069, IMPI-070 or IMPI-071.

[2175] C53. The antibody according to clause C51 or C52, wherein the variable heavy (VH) domain sequence comprises the VH domain sequence of antibody IMPI-003 and the variable light (VL) domain sequence comprises the VL domain sequence of antibody IMPI-003.

[2176] C54. The antibody according to clause C51 or C52, wherein the variable heavy (VH) domain sequence comprises the VH domain sequence of antibody IMPI-013 and the variable light (VL) domain sequence comprises the VL domain sequence of antibody IMPI-013.

[2177] C55. The antibody according to clause C51 or C52, wherein the variable heavy (VH) domain sequence comprises the VH domain sequence of antibody IMPI-063 and the variable light (VL) domain sequence comprises the VL domain sequence of antibody IMPI-063.

[2178] C56. The antibody according to clause C51 or C52, wherein the variable heavy (VH) domain sequence comprises the VH domain sequence of antibody IMPI-061 and the variable light (VL) domain sequence comprises the VL domain sequence of antibody IMPI-061.

[2179] C57. The antibody according to clause C51 or C52, wherein the variable heavy (VH) domain sequence comprises the VH domain sequence of antibody IMPI-062 and the variable light (VL) domain sequence comprises the VL domain sequence of antibody IMPI-062.

[2180] C58. The antibody according to clause C51 or C52, wherein the variable heavy (VH) domain sequence comprises the VH domain sequence of antibody IMPI-064 and the variable light (VL) domain sequence comprises the VL domain sequence of antibody IMPI-064.

[2181] C59. The antibody according to clause C51 or C52, wherein the variable heavy (VH) domain sequence comprises the VH domain sequence of antibody IMPI-065 and the variable light (VL) domain sequence comprises the VL domain sequence of antibody IMPI-065.

[2182] C60. The antibody according to clause C51 or C52, wherein the variable heavy (VH) domain sequence comprises the VH domain sequence of antibody IMPI-066 and the variable light (VL) domain sequence comprises the VL domain sequence of antibody IMPI-066.

[2183] C61. The antibody according to clause C51 or C52, wherein the variable heavy (VH) domain sequence comprises the VH domain sequence of antibody IMPI-069 and the variable light (VL) domain sequence comprises the VL domain sequence of antibody IMPI-069.

[2184] C62. The antibody according to clause C51 or C52, wherein the variable heavy (VH) domain sequence comprises the VH domain sequence of antibody IMPI-070 and the variable light (VL) domain sequence comprises the VL domain sequence of antibody IMPI-070.

[2185] C63. The antibody according to clause C51 or C52, wherein the variable heavy (VH) domain sequence comprises the VH domain sequence of antibody IMPI-071 and the variable light (VL) domain sequence comprises the VL domain sequence of antibody IMPI-071.

[2186] C64. The antibody according to clause C1, comprising VH and/or VL domain framework regions of human germline gene segment sequences.

[2187] C65. The antibody according to clause C1 or C64, comprising an antibody VH domain which
[2188] i) is derived from recombination of a human heavy chain V gene segment, a human heavy chain D gene segment and a human heavy chain J gene segment, wherein
   [2189] the V gene segment is IGHV3-9*01 or IGHV3-20*d01;
   [2190] and/or
   [2191] the J gene segment is IGHJ6*02 or IGHJ4*02, or
[2192] ii) comprises framework regions FR1, FR2, FR3 and FR4, wherein
   [2193] FR1 aligns with human germline V gene segment IGHV3-9*01 or IGHV3-20*d01 with up to 1, 2, 3, 4, or 5 amino acid alterations,
   [2194] FR2 aligns with human germline V gene segment IGHV3-9*01 or IGHV3-20*d01 with up to 1, 2, 3, 4, or 5 amino acid alterations,
   [2195] FR3 aligns with human germline V gene segment IGHV3-9*01 or IGHV3-20*d01 with up to 1, 2, 3, 4 or 5 amino acid alterations, and/or
   [2196] FR4 aligns with human germline J gene segment IGHJ6*02 or IGHJ4*02 with up to 1, 2, 3, 4 or 5 amino acid alterations.

[2197] C66. The antibody according to any one of clauses C1, C64 or C65, comprising an antibody VH domain which
[2198] i) is derived from recombination of a human heavy chain V gene segment IGHV3-9*01 or IGHV3-20*d01, a human heavy chain D gene segment and a human heavy chain J gene segment, or
[2199] ii) comprises framework regions FR1, FR2, FR3 and FR4, wherein FR1, FR2 and FR3 each align with human germline V segment IGHV3-9*01 or IGHV3-20*d01 with up to 1, 2, 3, 4 or 5 amino acid alterations.

[2200] C67. The antibody according to any one of clauses C1 or C61 to C66, wherein the J gene segment is IGHJ6*02 or IGHJ4*02, or wherein the VH domain framework region FR4 aligns with human germline J gene segment IGHJ6*02 or IGHJ4*02 with 1, 2, 3, 4 or 5 amino acid alterations.

[2201] C68. The antibody according to clause C1 or C64, comprising an antibody VL domain which
[2202] i) is derived from recombination of a human light chain V gene segment and a human light chain J gene segment, wherein
   [2203] the V gene segment is IGKV1-6*01 or IGKV3-20*01, and/or
   [2204] the J gene segment is IGKJ1*01 or IGKJ2*04; or
[2205] ii) comprises framework regions FR1, FR2, FR3 and FR4, wherein
   [2206] FR1 aligns with human germline V gene segment IGKV1-6*01 or IGKV3-20*01 with up to 1, 2, 3, 4, or 5 amino acid alterations,
   [2207] FR2 aligns with human germline V gene segment IGKV1-6*01 or IGKV3-20*01 with up to 1, 2, 3, 4, or 5 amino acid alterations
   [2208] FR3 aligns with human germline V gene segment IGKV1-6*01 or IGKV3-20*01 with up to 1, 2, 3, 4 or 5 amino acid alterations, and/or
   [2209] FR4 aligns with human germline J gene segment IGKJ1*01 or IGKJ2*04 with up to 1, 2, 3, 4 or 5 amino acid alterations.

[2210] C69. The antibody according to any one of clause C1 or C64, comprising an antibody VL domain derived from recombination of a human light chain V gene segment and a human light chain J gene segment,
[2211] wherein:
   [2212] the V gene segment is IGKV1-6*01 or IGKV3-20*01, and optionally
   [2213] the J gene segment is IGKJ1*01 or IGKJ2*04.

[2214] D1. An antibody that specifically binds to the receptor binding domain (RBD) of the SARS-CoV-2 spike protein, wherein the antibody does not compete for binding to the SARS-CoV-2 spike protein with the human ACE2 receptor.

[2215] D2. An antibody according to clause D1, wherein the antibody is a neutralising antibody.

[2216] D3. An antibody according to clause D1 or clause D2, wherein the antibody increases binding between SARS-CoV-2 and the human ACE2 receptor.

[2217] D4. An antibody according to any one of clauses D1 to D3,
[2218] wherein the antibody comprises a variable heavy (VH) domain sequence comprising complementarity determining regions (CDRs) HCDR1, HCDR2 and HCDR3, and a variable light (VL) domain sequence comprising complementarity determining regions LCDR1, LCDR2 and LCDR3,
[2219] wherein the HCDR3 is the HCDR3 of antibody IMPI-026, IMPI-034, IMPI-016, IMPI-050, IMPI-049, IMPI-015, IMPI-009, IMPI-011, IMPI-044, IMPI-046, IMPI-051, IMPI-024, IMPI-058, IMPI-043, IMPI-045, IMPI-027, IMPI-018, IMPI-048, IMPI-033, IMPI-014, IMPI-038 or IMPI-068.

[2220] D5. An antibody according to clause D2,
[2221] wherein the antibody comprises a variable heavy (VH) domain sequence comprising complementarity determining regions (CDRs) HCDR1, HCDR2 and HCDR3, and a variable light (VL) domain sequence comprising complementarity determining regions LCDR1, LCDR2 and LCDR3, wherein the HCDR3 is the HCDR3 of antibody IMPI-024, IMPI-027, IMPI-038 or IMPI-068.

[2222] D6. An antibody according to clause D3, wherein the antibody comprises a variable heavy (VH) domain sequence comprising complementarity determining regions (CDRs) HCDR1, HCDR2 and HCDR3, and a variable light (VL) domain sequence comprising complementarity determining regions LCDR1, LCDR2 and LCDR3, wherein the HCDR3 is the HCDR3 of antibody IMPI-027, IMPI-033, IMPI-038 or IMPI-068.

[2223] D7. The antibody according to clause D4, wherein the HCDR3 is the HCDR3 of antibody IMPI-026.

[2224] D8. The antibody according to clause D4, wherein the HCDR3 is the HCDR3 of antibody IMPI-034.

[2225] D9. The antibody according to clause D4, wherein the HCDR3 is the HCDR3 of antibody IMPI-016.

[2226] D10. The antibody according to clause D4, wherein the HCDR3 is the HCDR3 of antibody IMPI-050.

[2227] D1I. The antibody according to clause D4, wherein the HCDR3 is the HCDR3 of antibody IMPI-049.

[2228] D12. The antibody according to clause D4, wherein the HCDR3 is the HCDR3 of antibody IMPI-015.

[2229] D13. The antibody according to clause D4, wherein the HCDR3 is the HCDR3 of antibody IMPI-009.

[2230] D14. The antibody according to clause D4, wherein the HCDR3 is the HCDR3 of antibody IMPI-011.

[2231] D15. The antibody according to clause D4, wherein the HCDR3 is the HCDR3 of antibody IMPI-044.

[2232] D16. The antibody according to clause D4, wherein the HCDR3 is the HCDR3 of antibody IMPI-046.

[2233] D17. The antibody according to clause D4, wherein the HCDR3 is the HCDR3 of antibody IMPI-051.

[2234] D18. The antibody according to clause D4, wherein the HCDR3 is the HCDR3 of antibody IMPI-024.

[2235] D19. The antibody according to clause D4, wherein the HCDR3 is the HCDR3 of antibody IMPI-058.

[2236] D20. The antibody according to clause D4, wherein the HCDR3 is the HCDR3 of antibody IMPI-043.

[2237] D21. The antibody according to clause D4, wherein the HCDR3 is the HCDR3 of antibody IMPI-045.

[2238] D22. The antibody according to clause D4, wherein the HCDR3 is the HCDR3 of antibody IMPI-027.

[2239] D23. The antibody according to clause D4, wherein the HCDR3 is the HCDR3 of antibody IMPI-018.

[2240] D24. The antibody according to clause D4, wherein the HCDR3 is the HCDR3 of antibody IMPI-048.

[2241] D25. The antibody according to clause D4, wherein the HCDR3 is the HCDR3 of antibody IMPI-033.

[2242] D26. The antibody according to clause D4, wherein the HCDR3 is the HCDR3 of antibody IMPI-014.

[2243] D27. The antibody according to clause D4, wherein the HCDR3 is the HCDR3 of antibody IMPI-038.

[2244] D28. The antibody according to clause D4, wherein the HCDR3 is the HCDR3 of antibody IMPI-068.

[2245] D29. An anti-SARS-CoV-2 antibody, wherein the antibody comprises a variable heavy (VH) domain sequence comprising complementarity determining regions (CDRs) HCDR1, HCDR2, and HCDR3, and a variable light (VL) domain sequence comprising complementarity determining regions LCDR1, LCDR2 and LCDR3, wherein the CDRs are those of antibody IMPI-026, IMPI-034, IMPI-016, IMPI-050, IMPI-049, IMPI-015, IMPI-009, IMPI-011, IMPI-044, IMPI-046, IMPI-051, IMPI-024, IMPI-058, IMPI-043, IMPI-045, IMPI-027, IMPI-018, IMPI-048, IMPI-033, IMPI-014, IMPI-038 or IMPI-068.

[2246] D30. An antibody according to any one of clauses D1 to D3, wherein the antibody comprises a variable heavy (VH) domain sequence comprising complementarity determining regions (CDRs) HCDR1, HCDR2 and HCDR3, and a variable light (VL) domain sequence comprising complementarity determining regions LCDR1, LCDR2 and LCDR3, wherein the CDRs are those of antibody IMPI-026, IMPI-034, IMPI-016, IMPI-050, IMPI-049, IMPI-015, IMPI-009, IMPI-011, IMPI-044, IMPI-046, IMPI-051, IMPI-024, IMPI-058, IMPI-043, IMPI-045, IMPI-027, IMPI-018, IMPI-048, IMPI-033, IMPI-014, IMPI-038 or IMPI-068.

[2247] D31. An antibody according to clause D2, wherein the antibody comprises a variable heavy (VH) domain sequence comprising complementarity determining regions (CDRs) HCDR1, HCDR2 and HCDR3, and a variable light (VL) domain sequence comprising complementarity determining regions LCDR1, LCDR2 and LCDR3, wherein the CDRs are those of antibody IMPI-024, IMPI-027, IMPI-038 or IMPI-068.

[2248] D32. An antibody according to clause D3, wherein the antibody comprises a variable heavy (VH) domain sequence comprising complementarity determining regions (CDRs) HCDR1, HCDR2, and HCDR3, and a variable light (VL) domain sequence comprising complementarity determining regions LCDR1, LCDR2 and LCDR3, wherein the CDRs are those of antibody IMPI-027, IMPI-033, IMPI-038 or IMPI-068.

[2249] D33. The antibody according to clause D29 or clause D30, wherein the antibody has the CDRs of antibody IMPI-026.

[2250] D34. The antibody according to clause D29 or clause D30, wherein the antibody has the CDRs of antibody IMPI-034.

[2251] D35. The antibody according to clause D29 or clause D30, wherein the antibody has the CDRs of antibody IMPI-016.

[2252] D36. The antibody according to clause D29 or clause D30, wherein the antibody has the CDRs of antibody IMPI-050.

[2253] D37. The antibody according to clause D29 or clause D30, wherein the antibody has the CDRs of antibody IMPI-049.

[2254] D38. The antibody according to clause D29 or clause D30, wherein the antibody has the CDRs of antibody IMPI-015.

[2255] D39. The antibody according to clause D29 or clause D30, wherein the antibody has the CDRs of antibody IMPI-009.

[2256] D40. The antibody according to clause D29 or clause D30, wherein the antibody has the CDRs of antibody IMPI-011.

[2257] D41. The antibody according to clause D29 or clause D30, wherein the antibody has the CDRs of antibody IMPI-044.

[2258] D42. The antibody according to clause D29 or clause D30, wherein the antibody has the CDRs of antibody IMPI-046.

[2259] D43. The antibody according to clause D29 or clause D30, wherein the antibody has the CDRs of antibody IMPI-051.

[2260] D44. The antibody according to clause D29 or clause D30, wherein the antibody has the CDRs of antibody IMPI-024.

[2261] D45. The antibody according to clause D29 or clause D30, wherein the antibody has the CDRs of antibody IMPI-058.

[2262] D46. The antibody according to clause D29 or clause D30, wherein the antibody has the CDRs of antibody IMPI-043.

[2263] D47. The antibody according to clause D29 or clause D30, wherein the antibody has the CDRs of antibody IMPI-045.

[2264] D48. The antibody according to clause D29 or clause D30, wherein the antibody has the CDRs of antibody IMPI-027.

[2265] D49. The antibody according to clause D29 or clause D30, wherein the antibody has the CDRs of antibody IMPI-018.

[2266] D50. The antibody according to clause D29 or clause D30, wherein the antibody has the CDRs of antibody IMPI-048.

[2267] D51. The antibody according to clause D29 or clause D30, wherein the antibody has the CDRs of antibody IMPI-033.

[2268] D52. The antibody according to clause D29 or clause D30, wherein the antibody has the CDRs of antibody IMPI-014.

[2269] D53. The antibody according to clause D29 or clause D30, wherein the antibody has the CDRs of antibody IMPI-038.

[2270] D54. The antibody according to clause D29 or clause D30, wherein the antibody has the CDRs of antibody IMPI-068.

[2271] D55. An antibody according to any one of clauses D1 to D3, wherein the antibody comprises a variable heavy (VH) domain sequence and a variable light (VL) domain sequence and wherein the variable heavy (VH) domain and variable light (VL) domain sequences respectively comprise the variable heavy (VH) domain and variable light (VL) domain sequences of antibody IMPI-026, IMPI-034, IMPI-016, IMPI-050, IMPI-049, IMPI-015, IMPI-009, IMPI-011, IMPI-044, IMPI-046, IMPI-051, IMPI-024, IMPI-058, IMPI-043, IMPI-045, IMPI-027, IMPI-018, IMPI-048, IMPI-033, IMPI-014, IMPI-038 or IMPI-068, optionally with 1, 2, 3, 4 or 5 amino acid alterations outside the complementarity determining regions (CDRs) in the variable heavy (VH) domain sequence and optionally with 1, 2, 3, 4 or 5 amino acid alterations outside the complementarity determining regions (CDRs) in the variable light (VL) domain sequence.

[2272] D56. An antibody according to clause D2, wherein the antibody comprises a variable heavy (VH) domain sequence and a variable light (VL) domain sequence and wherein the variable heavy (VH) domain and variable light (VL) domain sequences respectively comprise the variable heavy (VH) domain and variable light (VL) domain sequences of antibody IMPI-024, IMPI-027, IMPI-038 or IMPI-068, optionally with 1, 2, 3, 4 or 5 amino acid alterations outside the complementarity determining regions (CDRs) in the variable heavy (VH) domain sequence and optionally with 1, 2, 3, 4 or 5 amino acid alterations outside the complementarity determining regions (CDRs) in the variable light (VL) domain sequence.

[2273] D57. An antibody according to clause D3, wherein the antibody comprises a variable heavy (VH) domain sequence and a variable light (VL) domain sequence and wherein the variable heavy (VH) domain and variable light (VL) domain sequences respectively comprise the variable heavy (VH) domain and variable light (VL) domain sequences of antibody IMPI-027, IMPI-033, IMPI-038 or IMPI-068, optionally with 1, 2, 3, 4 or 5 amino acid alterations outside the complementarity determining regions (CDRs) in the variable heavy (VH) domain sequence and optionally with 1, 2, 3, 4 or 5 amino acid alterations outside the complementarity determining regions (CDRs) in the variable light (VL) domain sequence.

[2274] D58. The antibody according to clause D55, wherein the antibody comprises a variable heavy (VH) domain sequence of antibody IMPI-026, optionally with 1, 2, 3, 4 or 5 amino acid alterations outside the complementarity determining regions (CDRs), and a variable light (VL) domain sequence of antibody IMPI-026, optionally with 1, 2, 3, 4 or 5 amino acid alterations outside the complementarity determining regions (CDRs).

[2275] D59. The antibody according to clause D55, wherein the antibody comprises a variable heavy (VH) domain sequence of antibody IMPI-034, optionally with 1, 2, 3, 4 or 5 amino acid alterations outside the complementarity determining regions (CDRs), and a variable light (VL) domain sequence of antibody IMPI-034, optionally with 1, 2, 3, 4 or 5 amino acid alterations outside the complementarity determining regions (CDRs).

[2276] D60. The antibody according to clause D55, wherein the antibody comprises a variable heavy (VH) domain sequence of antibody IMPI-016, optionally with 1, 2, 3, 4 or 5 amino acid alterations outside the complementarity determining regions (CDRs), and a variable light (VL) domain sequence of antibody IMPI-016, optionally with 1, 2, 3, 4 or 5 amino acid alterations outside the complementarity determining regions (CDRs).

[2277] D61. The antibody according to clause D55, wherein the antibody comprises a variable heavy (VH) domain sequence of antibody IMPI-050, optionally with 1, 2, 3, 4 or 5 amino acid alterations outside the complementarity determining regions (CDRs), and a variable light (VL) domain sequence of antibody IMPI-050, optionally with 1, 2, 3, 4 or 5 amino acid alterations outside the complementarity determining regions (CDRs).

[2278] D62. The antibody according to clause D55, wherein the antibody comprises a variable heavy (VH) domain sequence of antibody IMPI-049, optionally with 1, 2, 3, 4 or 5 amino acid alterations outside the complementarity determining regions (CDRs), and a variable light (VL) domain sequence of antibody IMPI-049, optionally with 1, 2, 3, 4 or 5 amino acid alterations outside the complementarity determining regions (CDRs).

[2279] D63. The antibody according to clause D55, wherein the antibody comprises a variable heavy (VH) domain sequence of antibody IMPI-015, optionally with 1, 2, 3, 4 or 5 amino acid alterations outside the complementarity determining regions (CDRs), and a variable light (VL) domain sequence of antibody IMPI-015, optionally with 1, 2, 3, 4 or 5 amino acid alterations outside the complementarity determining regions (CDRs).

[2280] D64. The antibody according to clause D55, wherein the antibody comprises a variable heavy (VH) domain sequence of antibody IMPI-009, optionally with 1, 2, 3, 4 or 5 amino acid alterations outside the complementarity determining regions (CDRs), and a variable light (VL) domain sequence of antibody IMPI-009, optionally with 1, 2, 3, 4 or 5 amino acid alterations outside the complementarity determining regions (CDRs).

[2281] D65. The antibody according to clause D55, wherein the antibody comprises a variable heavy (VH) domain sequence of antibody IMPI-011, optionally with 1, 2, 3, 4 or 5 amino acid alterations outside the complementarity determining regions (CDRs), and a variable light (VL) domain sequence of antibody IMPI-011, optionally with 1, 2, 3, 4 or 5 amino acid alterations outside the complementarity determining regions (CDRs).

[2282] D66. The antibody according to clause D55, wherein the antibody comprises a variable heavy (VH) domain sequence of antibody IMPI-044, optionally with 1, 2, 3, 4 or 5 amino acid alterations outside the complementarity determining regions (CDRs), and a variable light (VL) domain sequence of antibody IMPI-044, optionally with 1, 2, 3, 4 or 5 amino acid alterations outside the complementarity determining regions (CDRs).

[2283] D67. The antibody according to clause D55, wherein the antibody comprises a variable heavy (VH) domain sequence of antibody IMPI-046, optionally with 1, 2, 3, 4 or 5 amino acid alterations outside the complementarity determining regions (CDRs), and a variable light (VL) domain sequence of antibody IMPI-046, optionally with 1, 2, 3, 4 or 5 amino acid alterations outside the complementarity determining regions (CDRs).

[2284] D68. The antibody according to clause D55, wherein the antibody comprises a variable heavy (VH) domain sequence of antibody IMPI-051, optionally with 1, 2, 3, 4 or 5 amino acid alterations outside the complementarity determining regions (CDRs), and a variable light (VL) domain sequence of antibody IMPI-051, optionally with 1, 2, 3, 4 or 5 amino acid alterations outside the complementarity determining regions (CDRs).

[2285] D69. The antibody according to clause D55, wherein the antibody comprises a variable heavy (VH) domain sequence of antibody IMPI-024, optionally with 1, 2, 3, 4 or 5 amino acid alterations outside the complementarity determining regions (CDRs), and a variable light (VL) domain sequence of antibody IMPI-024, optionally with 1, 2, 3, 4 or 5 amino acid alterations outside the complementarity determining regions (CDRs).

[2286] D70. The antibody according to clause D55, wherein the antibody comprises a variable heavy (VH) domain sequence of antibody IMPI-058, optionally with 1, 2, 3, 4 or 5 amino acid alterations outside the complementarity determining regions (CDRs), and a variable light (VL) domain sequence of antibody IMPI-058, optionally with 1, 2, 3, 4 or 5 amino acid alterations outside the complementarity determining regions (CDRs).

[2287] D71. The antibody according to clause D55, wherein the antibody comprises a variable heavy (VH) domain sequence of antibody IMPI-043, optionally with 1, 2, 3, 4 or 5 amino acid alterations outside the complementarity determining regions (CDRs), and a variable light (VL) domain sequence of antibody IMPI-043, optionally with 1, 2, 3, 4 or 5 amino acid alterations outside the complementarity determining regions (CDRs).

[2288] D72. The antibody according to clause D55, wherein the antibody comprises a variable heavy (VH) domain sequence of antibody IMPI-045, optionally with 1, 2, 3, 4 or 5 amino acid alterations outside the complementarity determining regions (CDRs), and a variable light (VL) domain sequence of antibody IMPI-045, optionally with 1, 2, 3, 4 or 5 amino acid alterations outside the complementarity determining regions (CDRs).

[2289] D73. The antibody according to clause D55, wherein the antibody comprises a variable heavy (VH) domain sequence of antibody IMPI-027, optionally with 1, 2, 3, 4 or 5 amino acid alterations outside the complementarity determining regions (CDRs), and a variable light (VL) domain sequence of antibody IMPI-027, optionally with 1, 2, 3, 4 or 5 amino acid alterations outside the complementarity determining regions (CDRs).

[2290] D74. The antibody according to clause D55, wherein the antibody comprises a variable heavy (VH) domain sequence of antibody IMPI-018, optionally with 1, 2, 3, 4 or 5 amino acid alterations outside the complementarity determining regions (CDRs), and a variable light (VL) domain sequence of antibody IMPI-018, optionally with 1, 2, 3, 4 or 5 amino acid alterations outside the complementarity determining regions (CDRs).

[2291] D75. The antibody according to clause D55, wherein the antibody comprises a variable heavy (VH) domain sequence of antibody IMPI-048, optionally with 1, 2, 3, 4 or 5 amino acid alterations outside the complementarity determining regions (CDRs), and a variable light (VL) domain sequence of antibody IMPI-048, optionally with 1, 2, 3, 4 or 5 amino acid alterations outside the complementarity determining regions (CDRs).

[2292] D76. The antibody according to clause D55, wherein the antibody comprises a variable heavy (VH) domain sequence of antibody IMPI-033, optionally with 1, 2, 3, 4 or 5 amino acid alterations outside the complementarity determining regions (CDRs), and a variable light (VL) domain sequence of antibody IMPI-033, optionally with 1, 2, 3, 4 or 5 amino acid alterations outside the complementarity determining regions (CDRs).

[2293] D77. The antibody according to clause D55, wherein the antibody comprises a variable heavy (VH) domain sequence of antibody IMPI-014, optionally with 1, 2, 3, 4 or 5 amino acid alterations outside the complementarity determining regions (CDRs), and a variable light (VL) domain sequence of antibody IMPI-014, optionally with 1, 2, 3, 4 or 5 amino acid alterations outside the complementarity determining regions (CDRs).

[2294] D78. The antibody according to clause D55, wherein the antibody comprises a variable heavy (VH) domain sequence of antibody IMPI-038, optionally with 1, 2, 3, 4 or 5 amino acid alterations outside the complementarity determining regions (CDRs), and a variable light (VL) domain sequence of antibody IMPI-038, optionally with 1, 2, 3, 4 or 5 amino acid alterations outside the complementarity determining regions (CDRs).

[2295] D79. The antibody according to clause D55, wherein the antibody comprises a variable heavy (VH) domain sequence of antibody IMPI-068, optionally with 1, 2, 3, 4 or 5 amino acid alterations outside the complementarity determining regions (CDRs), and a variable light (VL) domain sequence of antibody IMPI-068, optionally with 1, 2, 3, 4 or 5 amino acid alterations outside the complementarity determining regions (CDRs).

[2296] D80. An antibody according to any one of clauses D1 to D3, wherein the antibody comprises a variable heavy (VH) domain sequence and a variable light (VL) domain sequence and wherein the variable heavy (VH) domain and variable light (VL) domain sequences respectively comprise a sequence having at least 90% identity to the variable heavy (VH) and variable light (VL) domain sequences of antibody IMPI-026, IMPI-034, IMPI-016, IMPI-050, IMPI-049, IMPI-015, IMPI-009, IMPI-011, IMPI-044, IMPI-046, IMPI-051, IMPI-024, IMPI-058, IMPI-043, IMPI-045, IMPI-027, IMPI-018, IMPI-048, IMPI-033, IMPI-014, IMPI-038 or IMPI-068, provided that the antibody has the CDRs of antibody IMPI-026, IMPI-034, IMPI-016, IMPI-050, IMPI-049, IMPI-015, IMPI-009, IMPI-011, IMPI-044, IMPI-046, IMPI-051, IMPI-024, IMPI-058, IMPI-043, IMPI-045, IMPI-027, IMPI-018, IMPI-048, IMPI-033, IMPI-014, IMPI-038 or IMPI-068. D81. An antibody according to clause D2, wherein the antibody comprises a variable heavy (VH) domain sequence and a variable light (VL) domain sequence and wherein the variable heavy (VH) domain and variable light (VL) domain sequences respectively comprise a sequence having at least 90% identity to the variable heavy (VH) and variable light (VL) domain sequences of antibody IMPI-024, IMPI-027, IMPI-038 or IMPI-068, provided that the antibody has the CDRs of antibody IMPI-024, IMPI-027, IMPI-038 or IMPI-068.

[2297] D82. An antibody according to clause D3, wherein the antibody comprises a variable heavy (VH) domain sequence and a variable light (VL) domain sequence and wherein the variable heavy (VH) domain and variable light (VL) domain sequences respectively comprise a sequence having at least 90% identity to the variable heavy (VH) and variable light (VL) domain sequences of antibody IMPI-027, IMPI-033, IMPI-038 or IMPI-068, provided that the antibody has the CDRs of antibody IMPI-027, IMPI-033, IMPI-038 or IMPI-068. D83. The antibody according to clause D80, wherein the variable heavy (VH) domain sequence comprises a sequence having at least 90% identity to the VH domain sequence of antibody IMPI-026 and the variable light (VL) domain sequence comprises a sequence having at least 90% identity to the VL domain sequence of antibody IMPI-026, provided that the antibody has the CDRs of antibody IMPI-026. D84. The antibody according to clause D80, wherein the variable heavy (VH) domain sequence comprises a sequence having at least 90% identity to the VH domain sequence of antibody IMPI-034 and the variable light (VL) domain sequence comprises a sequence having at least 90% identity to the VL domain sequence of antibody IMPI-034, provided that the antibody has the CDRs of antibody IMPI-034. D85. The antibody according to clause D80, wherein the variable heavy (VH) domain sequence comprises a sequence having at least 90% identity to the VH domain sequence of antibody IMPI-016 and the variable light (VL) domain sequence comprises a sequence having at least 90% identity to the VL domain sequence of antibody IMPI-016, provided that the antibody has the CDRs of antibody IMPI-016. D86. The antibody according to clause D80, wherein the variable heavy (VH) domain sequence comprises a sequence having at least 90% identity to the VH domain sequence of antibody IMPI-050 and the variable light (VL) domain sequence comprises a sequence having at least 90% identity to the VL domain sequence of antibody IMPI-050, provided that the antibody has the CDRs of antibody IMPI-050. D87. The antibody according to clause D80, wherein the variable heavy (VH) domain sequence comprises a sequence having at least 90% identity to the VH domain sequence of antibody IMPI-049 and the variable light (VL) domain sequence comprises a sequence having at least 90% identity to the VL domain sequence of antibody IMPI-049, provided that the antibody has the CDRs of antibody IMPI-049. D88. The antibody according to clause D80, wherein the variable heavy (VH) domain sequence comprises a sequence having at least 90% identity to the VH domain sequence of antibody IMPI-015 and the variable light (VL) domain sequence comprises a sequence having at least 90% identity to the VL domain sequence of antibody IMPI-015, provided that the antibody has the CDRs of antibody IMPI-015. D89. The antibody according to clause D80, wherein the variable heavy (VH) domain sequence comprises a sequence having at least 90% identity to the VH domain sequence of antibody IMPI-009 and the variable light (VL) domain sequence comprises a sequence having at least 90% identity to the VL domain sequence of antibody IMPI-009, provided that the antibody has the CDRs of antibody IMPI-009. D90. The antibody according to clause D80, wherein the variable heavy (VH) domain sequence comprises a sequence having at least 90% identity to the VH domain sequence of antibody IMPI-011 and the variable light (VL) domain sequence comprises a sequence having at least 90% identity to the VL domain sequence of antibody IMPI-011, provided that the antibody has the CDRs of antibody IMPI-011. D91. The antibody according to clause D80, wherein the variable heavy (VH) domain sequence comprises a sequence having at least 90% identity to the VH domain sequence of antibody IMPI-044 and the variable light (VL) domain sequence comprises a sequence having at least 90% identity to the VL domain sequence of antibody IMPI-044, provided that the antibody has the CDRs of antibody IMPI-044. D92. The antibody according to clause D80, wherein the variable heavy (VH) domain sequence comprises a sequence having at least 90% identity to the VH domain sequence of antibody IMPI-046 and the variable light (VL) domain sequence comprises a sequence having at least 90% identity to the VL domain sequence of antibody IMPI-046, provided that the antibody has the CDRs of antibody IMPI-046. D93. The antibody according to clause D80, wherein the variable heavy (VH) domain sequence comprises a sequence having at least 90% identity to the VH domain sequence of antibody IMPI-051 and the variable light (VL) domain sequence comprises a sequence having at least 90% identity to the VL domain sequence of antibody IMPI-051, provided that the antibody has the CDRs of antibody IMPI-051. D94. The antibody according to clause D80, wherein the variable heavy (VH) domain sequence comprises a sequence having at least 90% identity to the VH domain sequence of antibody I IMPI-024 and the variable light (VL) domain sequence comprises a sequence having at least 90% identity to the VL domain sequence of antibody IMPI-024, provided that the antibody has the CDRs of antibody IMPI-024. D95. The antibody according to clause D80, wherein the variable heavy (VH) domain sequence comprises a sequence having at least 90% identity to the VH domain sequence of antibody IMPI-058 and the variable light (VL) domain sequence comprises a sequence having at least 90% identity to the VL domain sequence of antibody IMPI-058, provided that the antibody has the CDRs of antibody IMPI-058. D96. The antibody according to clause D80, wherein the variable heavy (VH) domain sequence comprises a sequence having at least 90% identity to the VH domain sequence of antibody IMPI-043 and the variable light (VL) domain sequence comprises a sequence having at least 90% identity to the VL domain sequence of antibody IMPI-043, provided that the antibody has the CDRs of antibody IMPI-043. D97. The antibody according to clause D80, wherein the variable heavy (VH) domain sequence comprises a sequence having at least 90% identity to the VH domain sequence of antibody IMPI-045 and the variable light (VL) domain sequence comprises a sequence having at least 90% identity to the VL domain sequence of antibody IMPI-045, provided that the antibody has the CDRs of antibody IMPI-045. D98. The antibody according to clause D80, wherein the variable heavy (VH) domain sequence comprises a sequence having at least 90% identity to the VH domain sequence of antibody IMPI-027 and the variable light (VL) domain sequence comprises a sequence having at least 90% identity to the VL domain sequence of antibody IMPI-027, provided that the antibody has the CDRs of antibody IMPI-027. D99. The antibody according to clause D80, wherein the variable heavy (VH) domain sequence comprises a sequence having at least 90% identity to the VH domain sequence of antibody IMPI-018 and the variable light (VL) domain sequence comprises a sequence having at least 90% identity to the VL domain sequence of antibody IMPI-018, provided that the antibody has the CDRs of antibody IMPI-018. D100. The antibody according to clause D80, wherein the variable heavy (VH) domain sequence comprises a sequence having at least 90% identity to the VH domain sequence of antibody IMPI-048 and the variable light (VL) domain sequence comprises a sequence having at least 90% identity to the VL domain sequence of antibody IMPI-048, provided that the antibody has the CDRs of antibody IMPI-048. D101. The antibody according to clause D80, wherein the variable heavy (VH) domain sequence comprises a sequence having at least 90% identity to the VH domain sequence of antibody IMPI-033 and the variable light (VL) domain sequence comprises a sequence having at least 90% identity to the VL domain sequence of antibody IMPI-033, provided that the antibody has the CDRs of antibody IMPI-033. D102. The antibody according to clause D80, wherein the variable heavy (VH) domain sequence comprises a sequence having at least 90% identity to the VH domain sequence of antibody IMPI-014 and the variable light (VL) domain sequence comprises a sequence having at least 90% identity to the VL domain sequence of antibody IMPI-014, provided that the antibody has the CDRs of antibody IMPI-014. D103. The antibody according to clause D80, wherein the variable heavy (VH) domain sequence comprises a sequence having at least 90% identity to the VH domain sequence of antibody IMPI-038 and the variable light (VL) domain sequence comprises a sequence having at least 90% identity to the VL domain sequence of antibody IMPI-038, provided that the antibody has the CDRs of antibody IMPI-038. D104. The antibody according to clause D80, wherein the variable heavy (VH) domain sequence comprises a sequence having at least 90% identity to the VH domain sequence of antibody IMPI-068 and the variable light (VL) domain sequence comprises a sequence having at least 90% identity to the VL domain sequence of antibody IMPI-068, provided that the antibody has the CDRs of antibody IMPI-068. D105. An antibody according to any one of clauses D1 to D3, wherein the antibody comprises a variable heavy (VH) domain sequence and a variable light (VL) domain sequence and wherein the variable heavy (VH) domain and variable light (VL) domain sequences respectively comprise the variable heavy (VH) and variable light (VL) domain sequences of antibody IMPI-026, IMPI-034, IMPI-016, IMPI-050, IMPI-049, IMPI-015, IMPI-009, IMPI-011, IMPI-044, IMPI-046, IMPI-051, IMPI-024, IMPI-058, IMPI-043, IMPI-045, IMPI-027, IMPI-018, IMPI-048, IMPI-033, IMPI-014, IMPI-038 or IMPI-068.

[2298] D106. An antibody according to clause D2, wherein the antibody comprises a variable heavy (VH) domain sequence and a variable light (VL) domain sequence and wherein the variable heavy (VH) domain and variable light (VL) domain sequences respectively comprise the variable heavy (VH) and variable light (VL) domain sequences of antibody IMPI-024, IMPI-027, IMPI-038 or IMPI-068.

[2299] D107. An antibody according to clause D3, wherein the antibody comprises a variable heavy (VH) domain sequence and a variable light (VL) domain sequence and wherein the variable heavy (VH) domain and variable light (VL) domain sequences respectively comprise the variable heavy (VH) and variable light (VL) domain sequences of antibody IMPI-027, IMPI-033, IMPI-038 or IMPI-068.

[2300] D108. An anti-SARS-CoV-2 antibody, wherein the antibody comprises a variable heavy (VH) domain sequence and a variable light (VL) domain sequence and wherein the variable heavy (VH) domain and variable light (VL) domain sequences respectively comprise the variable heavy (VH) and variable light (VL) domain sequences of antibody IMPI-026, IMPI-034, IMPI-016, IMPI-050, IMPI-049, IMPI-015, IMPI-009, IMPI-011, IMPI-044, IMPI-046, IMPI-051, IMPI-024, IMPI-058, IMPI-043, IMPI-045, IMPI-027, IMPI-018, IMPI-048, IMPI-033, IMPI-014, IMPI-038 or IMPI-068.

[2301] D109. The antibody according to clause D105 or D108, wherein the variable heavy (VH) domain sequence comprises the VH domain sequence of antibody IMPI-026 and the variable light (VL) domain sequence comprises the VL domain sequence of antibody IMPI-026.

[2302] D110. The antibody according to clause D105 or D108, wherein the variable heavy (VH) domain sequence comprises the VH domain sequence of antibody IMPI-034 and the variable light (VL) domain sequence comprises the VL domain sequence of antibody IMPI-034.

[2303] D111. The antibody according to clause D105 or D108, wherein the variable heavy (VH) domain sequence comprises the VH domain sequence of antibody IMPI-016 and the variable light (VL) domain sequence comprises the VL domain sequence of antibody IMPI-016.

[2304] D112. The antibody according to clause D105 or D108, wherein the variable heavy (VH) domain sequence comprises the VH domain sequence of antibody IMPI-050 and the variable light (VL) domain sequence comprises the VL domain sequence of antibody IMPI-050.

[2305] D113. The antibody according to clause D105 or D108, wherein the variable heavy (VH) domain sequence comprises the VH domain sequence of antibody IMPI-049 and the variable light (VL) domain sequence comprises the VL domain sequence of antibody IMPI-049.

[2306] D114. The antibody according to clause D105 or D108, wherein the variable heavy (VH) domain sequence comprises the VH domain sequence of antibody IMPI-015 and the variable light (VL) domain sequence comprises the VL domain sequence of antibody IMPI-015.

[2307] D115. The antibody according to clause D105 or D108, wherein the variable heavy (VH) domain sequence comprises the VH domain sequence of antibody IMPI-009 and the variable light (VL) domain sequence comprises the VL domain sequence of antibody IMPI-009.

[2308] D116. The antibody according to clause D105 or D108, wherein the variable heavy (VH) domain sequence comprises the VH domain sequence of antibody IMPI-011 and the variable light (VL) domain sequence comprises the VL domain sequence of antibody IMPI-011.

[2309] D117. The antibody according to clause D105 or D108, wherein the variable heavy (VH) domain sequence comprises the VH domain sequence of antibody IMPI-044 and the variable light (VL) domain sequence comprises the VL domain sequence of antibody IMPI-044.

[2310] D118. The antibody according to clause D105 or D108, wherein the variable heavy (VH) domain sequence comprises the VH domain sequence of antibody IMPI-046 and the variable light (VL) domain sequence comprises the VL domain sequence of antibody IMPI-046.

[2311] D119. The antibody according to clause D105 or D108, wherein the variable heavy (VH) domain sequence comprises the VH domain sequence of antibody IMPI-051 and the variable light (VL) domain sequence comprises the VL domain sequence of antibody IMPI-051.

[2312] D120. The antibody according to clause D105 or D108, wherein the variable heavy (VH) domain sequence comprises the VH domain sequence of antibody IMPI-024 and the variable light (VL) domain sequence comprises the VL domain sequence of antibody IMPI-024.

[2313] D121. The antibody according to clause D105 or D108, wherein the variable heavy (VH) domain sequence comprises the VH domain sequence of antibody IMPI-058 and the variable light (VL) domain sequence comprises the VL domain sequence of antibody IMPI-058.

[2314] D122. The antibody according to clause D105 or D108, wherein the variable heavy (VH) domain sequence comprises the VH domain sequence of antibody IMPI-043 and the variable light (VL) domain sequence comprises the VL domain sequence of antibody IMPI-043.

[2315] D123. The antibody according to clause D105 or D108, wherein the variable heavy (VH) domain sequence comprises the VH domain sequence of antibody IMPI-045 and the variable light (VL) domain sequence comprises the VL domain sequence of antibody IMPI-045.

[2316] D124. The antibody according to clause D105 or D108, wherein the variable heavy (VH) domain sequence comprises the VH domain sequence of antibody IMPI-027 and the variable light (VL) domain sequence comprises the VL domain sequence of antibody IMPI-027.

[2317] D125. The antibody according to clause D105 or D108, wherein the variable heavy (VH) domain sequence comprises the VH domain sequence of antibody IMPI-018 and the variable light (VL) domain sequence comprises the VL domain sequence of antibody IMPI-018.

[2318] D126. The antibody according to clause D105 or D108, wherein the variable heavy (VH) domain sequence comprises the VH domain sequence of antibody IMPI-048 and the variable light (VL) domain sequence comprises the VL domain sequence of antibody IMPI-048.

[2319] D127. The antibody according to clause D105 or D108, wherein the variable heavy (VH) domain sequence comprises the VH domain sequence of antibody IMPI-033 and the variable light (VL) domain sequence comprises the VL domain sequence of antibody IMPI-033.

[2320] D128. The antibody according to clause D105 or D108, wherein the variable heavy (VH) domain sequence comprises the VH domain sequence of antibody IMPI-014 and the variable light (VL) domain sequence comprises the VL domain sequence of antibody IMPI-014.

[2321] D129. The antibody according to clause D105 or D108, wherein the variable heavy (VH) domain sequence comprises the VH domain sequence of antibody IMPI-038 and the variable light (VL) domain sequence comprises the VL domain sequence of antibody IMPI-038.

[2322] D130. The antibody according to clause D105 or D108, wherein the variable heavy (VH) domain sequence comprises the VH domain sequence of antibody IMPI-068 and the variable light (VL) domain sequence comprises the VL domain sequence of antibody IMPI-068.

[2323] D131. The antibody according to any one of clauses D1 to D3, comprising VH and/or VL domain framework regions of human germline gene segment sequences.

[2324] D132. The antibody according to any one of clauses D1 to D3 or D131, comprising an antibody VH domain which
[2325] i) is derived from recombination of a human heavy chain V gene segment, a human heavy chain D gene segment and a human heavy chain J gene segment, wherein the V gene segment is IGHV5-51*01, IGHV4-31*03 or IGHV3-30*18;
[2326] and/or the J gene segment is IGHJ4*02 or IGHJ6*02, or
[2327] ii) comprises framework regions FR1, FR2, FR3 and FR4, wherein FR1 aligns with human germline V gene segment IGHV5-51*01, IGHV4-31*03 or IGHV3-30*18 with up to 1, 2, 3, 4, or 5 amino acid alterations, FR2 aligns with human germline V gene segment IGHV5-51*01, IGHV4-31*03 or IGHV3-30*18 with up to 1, 2, 3, 4, or 5 amino acid alterations, FR3 aligns with human germline V gene segment IGHV5-51*01, IGHV4-31*03 or IGHV3-30*18 with up to 1, 2, 3, 4 or 5 amino acid alterations, and/or FR4 aligns with human germline J gene segment IGHJ4*02 or IGHJ6*02 with up to 1, 2, 3, 4 or 5 amino acid alterations.

[2328] D133. The antibody according to any one of clauses D1 to D3, D131 or D132, comprising an antibody VH domain which
[2329] i) is derived from recombination of a human heavy chain V gene segment IGHV5-51*01, IGHV4-31*03 or IGHV3-30*18, a human heavy chain D gene segment and a human heavy chain J gene segment, or
[2330] ii) comprises framework regions FR1, FR2, FR3 and FR4, wherein FR1, FR2 and FR3 each align with human germline V segment IGHV5-51*01, IGHV4-31*03 or IGHV3-30*18 with up to 1, 2, 3, 4 or 5 amino acid alterations.

[2331] D134. The antibody according to any one of clauses D1 to D3 or D131 to D133, wherein the J gene segment is IGHJ4*02 or IGHJ6*02, or wherein the VH domain framework region FR4 aligns with human germline J gene segment IGHJ4*02 or IGHJ6*02 with 1, 2, 3, 4 or 5 amino acid alterations. D135. The antibody according to any one of clauses D1 to D3 or D131, comprising an antibody VL domain which
[2332] i) is derived from recombination of a human light chain V gene segment and a human light chain J gene segment, wherein the V gene segment is IGKV1D-13*d01 or IGKV1-12*01, and/or the J gene segment is IGKJ1*01, IGKJ4*01 or IGKJ3*01; or
[2333] ii) comprises framework regions FR1, FR2, FR3 and FR4, wherein FR1 aligns with human germline V gene segment IGKV1D-13*d01 or IGKV1-12*01 with up to 1, 2, 3, 4, or 5 amino acid alterations, FR2 aligns with human germline V gene segment IGKV1D-13*d01 or IGKV1-12*01 with up to 1, 2, 3, 4, or 5 amino acid alterations FR3 aligns with human germline V gene segment IGKV1D-13*d01 or IGKV1-12*01 with up to 1, 2, 3, 4 or 5 amino acid alterations, and/or FR4 aligns with human germline J gene segment IGKJ1*01, IGKJ4*01 or IGKJ3*01 with up to 1, 2, 3, 4 or 5 amino acid alterations.

[2334] D136. The antibody according to any one of clauses D1 to D3 or D131, comprising an antibody VL domain derived from recombination of a human light chain V gene segment and a human light chain J gene segment, wherein:
[2335] the V gene segment is IGKV1D-13*d01 or IGKV1-12*01, and optionally the J gene segment is IGKJ1*01, IGKJ4*01 or IGKJ3*01.

[2336] E1. The antibody according to any one of clauses A 1 to A109, B1 to B106, C1 to C63, or D1 to D130, wherein the antibody is a human IgG1.

[2337] E2. The antibody according to clause E1, wherein the antibody is a human IgG1 comprising a constant region sequence of SEQ ID NO: 418.

[2338] E3. The antibody according to any one of clauses A 1 to A109, B1 to B106, C1 to C63, or D1 to D130, wherein the antibody is a human IgG4.

[2339] E4. The antibody according to clause E3, wherein the antibody is a human IgG4 comprising a constant region sequence of SEQ ID NO: SEQ ID NO: 436.

[2340] E5. The antibody according to any one of clauses A1 to A109, B1 to B106, C1 to C63, D1 to D130, or E1 to E6 wherein the antibody comprises kappa (κ) light chain constant regions, preferably wherein the kappa (κ) light chain constant regions sequence is SEQ ID NO: 448.

[2341] E6. A nucleic acid comprising a sequence that encodes a VH domain and/or an VL domain of an antibody as defined in any preceding clause.

[2342] E7. A nucleic acid comprising a sequence that encodes a VH domain and/or an VL domain of antibody IMPI-029, IMPI-056, IMPI-005, IMPI-012, IMPI-052, IMPI-002, IMPI-041, IMPI-036, IMPI-055, IMPI-054, IMPI-042, IMPI-021, IMPI-004, IMPI-047, IMPI-017, IMPI-059, IMPI-030, IMPI-053, IMPI-025, IMPI-040, IMPI-007, IMPI-020, IMPI-032, IMPI-023, IMPI-039, IMPI-001, IMPI-019, IMPI-010, IMPI-008, IMPI-031, IMPI-057, IMPI-022, IMPI-035, IMPI-067, IMPI-072, IMPI-003, IMPI-013, IMPI-063, IMPI-061, IMPI-062, IMPI-064, IMPI-065, IMPI-066, IMPI-069, IMPI-070, IMPI-071; IMPI-026, IMPI-034, IMPI-016, IMPI-050, IMPI-049, IMPI-015, IMPI-009, IMPI-011, IMPI-044, IMPI-046, IMPI-051, IMPI-024, IMPI-058, IMPI-043, IMPI-045, IMPI-027, IMPI-018, IMPI-048, IMPI-033, IMPI-014, IMPI-028, IMPI-038 or IMPI-068.

[2343] E8. A nucleic acid comprising a sequence that encodes the VH domain of antibody IMPI-029, IMPI-056, IMPI-005, IMPI-012, IMPI-052, IMPI-002, IMPI-041, IMPI-036, IMPI-055, IMPI-054, IMPI-042, IMPI-021, IMPI-004, IMPI-047, IMPI-017, IMPI-059, IMPI-030, IMPI-053, IMPI-025, IMPI-040, IMPI-007, IMPI-020, IMPI-032, IMPI-023, IMPI-039, IMPI-001, IMPI-019, IMPI-010, IMPI-008, IMPI-031, IMPI-057, IMPI-022, IMPI-035, IMPI-067, IMPI-072, IMPI-003, IMPI-013, IMPI-063, IMPI-061, IMPI-062, IMPI-064, IMPI-065, IMPI-066, IMPI-069, IMPI-070, IMPI-071; IMPI-026, IMPI-034, IMPI-016, IMPI-050, IMPI-049, IMPI-015, IMPI-009, IMPI-011, IMPI-044, IMPI-046, IMPI-051, IMPI-024, IMPI-058, IMPI-043, IMPI-045, IMPI-027, IMPI-018, IMPI-048, IMPI-033, IMPI-014, IMPI-028, IMPI-038 or IMPI-068.

[2344] E9. A nucleic acid comprising a sequence that encodes the VL domain of antibody IMPI-029, IMPI-056, IMPI-005, IMPI-012, IMPI-052, IMPI-002, IMPI-041, IMPI-036, IMPI-055, IMPI-054, IMPI-042, IMPI-021, IMPI-004, IMPI-047, IMPI-017, IMPI-059, IMPI-030, IMPI-053, IMPI-025, IMPI-040, IMPI-007, IMPI-020, IMPI-032, IMPI-023, IMPI-039, IMPI-001, IMPI-019, IMPI-010, IMPI-008, IMPI-031, IMPI-057, IMPI-022, IMPI-035, IMPI-067, IMPI-072, IMPI-003, IMPI-013, IMPI-063, IMPI-061, IMPI-062, IMPI-064, IMPI-065, IMPI-066, IMPI-069, IMPI-070, IMPI-071; IMPI-026, IMPI-034, IMPI-016, IMPI-050, IMPI-049, IMPI-015, IMPI-009, IMPI-011, IMPI-044, IMPI-046, IMPI-051, IMPI-024, IMPI-058, IMPI-043, IMPI-045, IMPI-027, IMPI-018, IMPI-048, IMPI-033, IMPI-014, IMPI-028, IMPI-038 or IMPI-068.

[2345] E10. A vector comprising the nucleic acid of any one of clauses E6 to E9; optionally wherein the vector is a CHO vector.

[2346] E11. A host cell comprising the nucleic acid of any one of clauses E6 to E9 or the vector of clause E10. E12. A pharmaceutical composition comprising an antibody according to any one of clauses A1 to A 115, B1 to B 112, C1 to C69, D1 to D136 or E1 to E5 and a pharmaceutically acceptable excipient. E13. A pharmaceutical composition comprising an isolated nucleic acid encoding an antibody according to any one of clauses A1 to A 115, B1 to B 112, C1 to C69, D1 to D136 or E1 to E5, or the isolated nucleic acid of any one of clauses E8 to E 11 and a pharmaceutically acceptable excipient.

[2347] E14. The pharmaceutical composition according to clause E12 or E13, formulated for intravenous, intramuscular or subcutaneous administration.

[2348] E15. The pharmaceutical composition according to any of clauses E12 to E14, further comprising at least one further therapeutic agent.

[2349] E16. The pharmaceutical composition of clause E15, wherein the further therapeutic agent is at least one, preferably one or two, further antibodies.

[2350] E17. The pharmaceutical composition of clause E16, wherein the at least one further antibody is selected from:
[2351] a. an antibody that specifically binds to the receptor binding domain (RBD) of the S1 subunit of the SARS-CoV-2 spike protein and competes for binding to the SARS-CoV-2 spike protein with the human ACE2 receptor;
[2352] b. an antibody that specifically binds to the receptor binding domain (RBD) of the S1 subunit of the SARS-CoV-2 spike protein and does not compete for binding to the SARS-CoV-2 spike protein with the human ACE2 receptor;
[2353] c. an antibody that specifically binds to the N-terminal domain (NTD) of the S1 subunit of the of SARS-CoV-2 spike protein;
[2354] d. an antibody that specifically binds to the S2 subunit of the of SARS-CoV-2 spike protein; and e. an antibody preferentially binds to the trimer form of the SARS-CoV-2 spike protein over the isolated RBD domain, S1 subunit and S2 subunit ofthe SARS-CoV-2 spike protein.

[2355] E18. A kit comprising the pharmaceutical composition of any one of clauses E12 to E17.

[2356] E19. A kit comprising the pharmaceutical composition of any one of clauses E12 to E14.

[2357] E20. The kit according to clause E19 further comprising at least one further therapeutic agent.

[2358] E21. The kit according to clause E20, wherein the further therapeutic agent is a further pharmaceutical composition comprising at least one, preferably one or two, further antibodies.

[2359] E22. The kit according to clause E21, wherein the at least one further antibody is selected from: a. an antibody that specifically binds to the receptor binding domain (RBD) of the S1 subunit of the SARS-CoV-2 spike protein and competes for binding to the SARS-CoV-2 spike protein with the human ACE2 receptor;
[2360] b. an antibody that specifically binds to the receptor binding domain (RBD) of the S1 subunit of the SARS-CoV-2 spike protein and does not compete for binding to the SARS-CoV-2 spike protein with the human ACE2 receptor;
[2361] c. an antibody that specifically binds to the N-terminal domain (NTD) of the S1 subunit of the of SARS-CoV-2 spike protein;
[2362] d. an antibody that specifically binds to the S2 subunit of the of SARS-CoV-2 spike protein; and e. an antibody preferentially binds to the trimer form of the SARS-CoV-2 spike protein over the isolated RBD domain, S1 subunit and S2 subunit ofthe SARS-CoV-2 spike protein.

[2363] E23. The kit according to any of clauses E18 and E22, further comprising a label or instructions for use to treat and/or prevent a SARS-CoV-2-related disease or condition, such as COVID-19, in a human; optionally wherein the label or instructions comprise a marketing authorisation number (e.g., an FDA or EMA authorisation number); optionally wherein the kit comprises an IV or injection device that comprises the antibody or fragment.

[2364] E24. The antibody according to any one of clauses A1 to A115, B1 to B112, C1 to C69, D1 to D136 or E1 to E5, or the composition according to any one of clauses E12 to E19, for use as a medicament. E25. The antibody according to any one of clauses A1 to A115, B1 to B112, C1 to C69, D1 to D136 or E1 to E5, or the composition according to any one of clauses E12 to E19, for use in a method of treating a SARS-CoV-2-related disease or condition, said method comprising administering the antibody or composition to a patient.

[2365] E26. The antibody according to any one of clauses A1 to A115, B1 to B112, C1 to C69, D1 to D136 or E1 to E5, or the composition according to any one of clauses E12 to E19, for use in a method of preventing a SARS-CoV-2-related disease or condition, said method comprising administering the antibody or composition to a patient.

[2366] E27. Use of an antibody according to any one of clauses A1 to A115, B1 to B112, C1 to C69, D1 to D136 or E1 to E5, or the composition according to any one of clauses E12 to E19, in the manufacture of a medicament for use in a method of treating a SARS-CoV-2-related disease or condition.

[2367] E28. Use of an antibody according to any one of clauses A1 to A115, B1 to B112, C1 to C69, D1 to D136 or E1 to E5, or the composition according to any one of clauses E12 to E19, in the manufacture of a medicament for use in a method of preventing a SARS-CoV-2-related disease or condition.

[2368] E29. A method of treating a SARS-CoV-2-related disease or condition in a human, comprising administering to said human a therapeutically effective amount of an antibody according to any one of clauses A1 to A115, B1 to B 112, C1 to C69, D1 to D136 or E1 to E5, or the composition according to any one of clauses E12 to E19.

[2369] E30. A method of preventing a SARS-CoV-2-related disease or condition in a human, comprising administering to said human a therapeutically effective amount of an antibody according to any one of clauses A1 to A 115, B1 to B112, C1 to C69, D1 to D136 or E1 to E5, or the composition according to any one of clauses E12 to E19.

[2370] E31. The antibody for use according to clause E25 or E26, or the composition for use according to clause E25 or E26, or the use of an antibody according to clause E27 or E28, or the method according to clause E29 or E30, wherein the SARS-CoV-2-related disease or condition is COVID-19.

[2371] E32. The antibody for use according to any one of clauses E25, E26 or E31, or the composition for use according to any one of clauses E25, E26 or E31, or the use of an antibody according to any one of clauses E27, E28 or E31, or the method according to any one of clauses E29, E30 or E32, said method further comprising administering at least one further therapeutic agent.

[2372] E33. The antibody for use according to any one of clauses E25, E26, E31 or E32, or the composition for use according to any one of clauses E25, E26, E31 or E32, or the use of an antibody according to any one of clauses E27, E28, E31 or E32, or the method according to any one of clauses E29, E30, E31 or E32, wherein administration of the further therapeutic agent is simultaneous, separate or sequential.

[2373] E34. The antibody for use according to any one of clauses E25, E26, or E31 to E33, or the composition for use according to any one of clauses E25, E26, or E31 to E33, or the use of an antibody according to any one of clauses E27, E28, or E31 to E33, or the method according to any one of clauses E29, E30, or E31 to E33, wherein the further therapeutic agent is at least one, preferably one or two, further antibodies.

[2374] E35. The antibody for use according to any one of clauses E25, E26, or E31 to E34, or the composition for use according to any one of clauses E25, E26, or E31 to E34, or the use of an antibody according to any one of clauses E27, E28, or E31 to E34, or the method according to any one of clauses E29, E30, or E31 to E34, wherein the at least one further antibody is selected from:
[2375] a. an antibody that specifically binds to the receptor binding domain (RBD) of the S1 subunit of the SARS-CoV-2 spike protein and competes for binding to the SARS-CoV-2 spike protein with the human ACE2 receptor;
[2376] b. an antibody that specifically binds to the receptor binding domain (RBD) of the S1 subunit of the SARS-CoV-2 spike protein and does not compete for binding to the SARS-CoV-2 spike protein with the human ACE2 receptor;
[2377] c. an antibody that specifically binds to the N-terminal domain (NTD) of the S1 subunit of the of SARS-CoV-2 spike protein;
[2378] d. an antibody that specifically binds to the S2 subunit of the of SARS-CoV-2 spike protein; and e. an antibody preferentially binds to the trimer form of the SARS-CoV-2 spike protein over the isolated RBD domain, S1 subunit and S2 subunit ofthe SARS-CoV-2 spike protein.

[2379] E36. Use of an antibody according to any of clauses A1 to A115, B1 to B112, C1 to C69, D1 to D136 or E1 to E5, for determining the presence or absence of SARS-CoV-2 in a sample.

[2380] E37. A method of determining the presence or absence of SARS-CoV-2, in a sample, the method comprising contacting the sample with an antibody according to any of clauses A1 to A115, B1 to B112, C1 to C69, D1 to D136 or E1 to E5; and testing for binding between the antibody and SARS-CoV-2 in the sample;
[2381] wherein detection of binding indicates the presence of SARS-CoV-2 in the sample and wherein absence of binding indicates the absence of SARS-CoV-2 in the sample.

[2382] E38. Use according to clause E36 or a method according to clause E37, wherein the antibody comprises or is conjugated to a detectable label.

[2383] E39. Use according to clause E36 or clause E38, or a method according to clause E37 or clause E38, wherein the sample has been obtained from a human who has been or is suspected of having been infected with SARS-CoV-2 and/or who exhibits one or more symptoms of a SARS-CoV-2-related disease or condition, such as COVID-19.

[2384] E40. Use or a method according to any of clauses E36, E38 or E39, or a method according to any one of clauses E37 to E40, wherein the sample is a serum, plasma, or whole blood sample, or an oral or nasal swab, urine, faeces, or cerebrospinal fluid (CFS), or wherein the sample is from any suspected SARS-CoV-2 infected organ or tissue.

[2385] E41. A diagnostic kit for the use as set out in any of clauses E36 or E38 to E40, or the method as set out in any of clauses E37 to E40, comprising an antibody according to any of clauses A1 to A 115, B1 to B 112, C1 to C69, D1 to D136 or E1 to E5, and optionally one or more buffering solutions. E42. A diagnostic kit according to clause E41, wherein the antibody comprises or is conjugated to a detectable label.

[2386] E43. A diagnostic kit according to clause E42, comprising a first reagent comprising the antibody according to any of clauses A1 to A 115, B1 to B 112, C1 to C69, D1 to D136 or E1 to E5, and a second reagent comprising a detector molecule that binds to the first reagent.

[2387] E44. A diagnostic kit according to clause E43, wherein the detector molecule is an antibody that comprises or is conjugated to a detectable label.

### EXAMPLES

[2388] Here we describe antibodies binding to the spike protein of SARS-CoV-2 which are suitable for use in treating COVID19 disease. Through immunising transgenic mice which generate fully human antibodies and testing a wide diversity of antibodies in a series of biologically relevant assays, we were able to obtain spike-binding monoclonal antibodies which neutralise the entry of SARS-CoV-2 into target cells. These antibodies target multiple domains on the spike protein, including S1 (e.g., RBD) and/or S2, and can be used alone or in combination as a therapeutic or prophylactic against SARS-CoV-2 (e.g., for administration to human patients) or as a diagnostic for detecting SARS-CoV-2, (e.g., in in vitro diagnostic test assays and kits).

### Example 1. Generation of Sars-Cov-2 Spike Antigens and Anti-Spike Antibodies

[2389] Kymab Darwin transgenic mice, which produce human antibodies, were immunised with SARS-CoV-2 spike in a variety of immunisation regimens and immunogenic formats, and antigen-specific B cells were selected from the immunised mice. Single B cells from spleen, lymph node and bone marrow samples were sorted using a combination of plasma cell sorting and antigen specific probes. Immunogenic formats included (i) nucleic acid encoding full length spike protein (sequence as depicted in FIG. 2B) and/or a (ii) soluble trimeric spike extracellular domain protein (ECD) comprising a C-terminal T4 fibritin (foldon) trimerisation motif (Meier et al., J Mol Biol. 2004 Dec. 3; 344(4):1051-69). This soluble version ends at glutamine Q1208 of the pre-fusion sequence followed by a GGGGSGGGGS linker, the T4 fibritin (foldon) trimerization motif, a further GGGGSGGGGS linker, the Myc tag, a GSGSGS linker and finally an 8xHIS tag to enable purification of the soluble recombinant protein. Sorting probes used were: soluble trimeric spike extracellular domain protein comprising C-terminal T4 fibritin (foldon) trimerisation motif, soluble spike receptor binding domain (RBD) protein (monomeric) and full length trimeric spike protein presented on green fluorescent protein (GFP) virus like particles (VLPs) generated from host cells transfected with DNA encoding full length spike protein. All constructs that encoded the spike protein contained the double proline stabilising mutations depicted in FIG. 2B.

[2390] In a first study, 8,219 B-cells were recovered after B cell sorting from immunised mice. From 224 of these B-cells, complete antibody heavy and light chain encoding nucleic acids were recovered, and expressed as fully human IgG1 antibodies in mammalian host cells to be taken forward for screening.

[2391] In a second study, 2,183 B cells were recovered after B cell sorting from immunised mice, and from 268 of these B-cells, complete antibody heavy and light chain encoding nucleic acids were recovered, and expressed as fully human IgG1 antibodies in mammalian host cells to be taken forward for screening

[2392] All antibodies taken forward for screening were expressed as fully human IgG1 kappa.

### Antigen/Immunogen Preparation

[2393] To generate purified proteins for use in mouse immunisations and sorting of B cells, DNA sequences were generated encoding ECD of trimeric spike protein containing stabilising double proline (PP) mutations (K968 and V969). Coding sequences were fused with a C-terminal His tag and N-terminal leader sequence, codon optimised for mammalian expression and expressed in CHO cells. ECD for immunisations also included a trimerisation motif as noted above. Protein was sequentially purified by a HisTrap HP column and a HiPrep 16/60 Sephacryl S-300 HR size exclusion chromatography (SEC) column (both from GE Healthcare). Purified protein was first analyzed by Native-PAGE and Western blot, and then filtered through a 0.22 μm membrane, aliquoted and stored at −80° C.

[2394] Stable cell lines expressing the SARS-CoV-2 full-length trimeric spike protein were created to generate virus like particles for sorting B cells. A full length DNA sequence encoding trimeric spike protein containing a double proline stabilising mutation (K968 and V969) was cloned into an expression vector under the control of the CMV promoter flanked by 3′ and 5′ piggyBac specific terminal repeat sequences, which facilitated stable integration into the cell genome. The expression vector contained a puromycin selection cassette to facilitate stable cell line generation. Constructs were transfected into HEK293 cell line, cultured under puromycin selection for 2 weeks and spike cell surface expression was validated by using flow cytometry to check for antigen surface expression using anti-spike monoclonal antibodies (cross-reactive anti-RBD SARS-CoV-1 antibody CR3022 obtained from Neil King, University of Washington, and anti-RBD SARS-CoV-2 antibody 40150-D001 from Sino Biologicals). VLPs were generated from HEK293 cells stably co-expressing PP stabilised trimeric spike with retroviral Group Antigens (gag) proteins and used for sorting specific B cells.

### Example 2. Antibody Binding by HTRF

[2395] A homogeneous time resolved FRET (HTRF) assay was used for primary screening to establish binding of the recovered antibodies to purified spike proteins. All antibodies were screened in an initial single point assay at 1-2 μg/mL for binding to the RBD domain (Acro Biosystems SPD-C52H3), the S1 subunit (Sino Biologicals 40591-V08H), the S2 subunit (Sino Biologicals 40590-V08B) and the stabilised soluble spike trimer protein ECD (including engineered trimerisation motif) of SARS-CoV-2 virus (see domains in FIG. 2B for reference). A summary of the primary screening results is shown in Table E2-1.

[2396] The 492 selected antibodies from Example 1 were screened in 4 batches, and 263 passed this initial HTRF screening. Criteria for passing the HTRF primary screen were that the antibody bound soluble spike trimer, S2, S1 or RBD with a ΔF value set out in Table E2-1.

TABLE E2-1
Screening from batch 1, 2, 3 and 4 Summary of number of clones meeting primary screening
selection criteria for binding to RBD, S1, S2 and spike trimer proteins. Table details
number of antibodies screened, number of positive hits and associated cut-off values.

| | Screening batch 1: | | | Screening batch 4: | | | | |
|---|---|---|---|---|---|---|---|---|
| | 151 clones | | | 83 clones | | | | |
| | Selection | No. | Selection | No. | Selection | No. | Selection | No. |
| Assay | criteria | hits | criteria | hits | criteria | hits | criteria | hits |
| Trimer | Delta F > 180 | 58 | Delta F > 50 | 71 | Delta F > 60 | 62 | Delta F > 50 | 64 |
| S2 | Delta F > 45 | 30 | Delta F > 30 | 33 | Delta F > 70 | 25 | Delta F > 40 | 39 |
| S1 | Delta F > 72 | 23 | Delta F > 10 | 23 | Delta F > 15 | 4 | Delta F > 10 | 10 |
| RBD | Delta F > 20 | 20 | Delta F > 40 | 19 | Delta F > 30 | 2 | Delta F > 10 | 6 |

[2397] On the basis of these data, we selected clones which met the HTRF binding criteria for binding spike trimer and optionally also met the HTRF binding criteria for S1, S2 or RBD. 255 such clones were selected. No antibodies were detected that were positive (passed the criteria) for both S1 and S2 in the HTRF assay. FIG. 4 summarises numbers of antibodies binding to trimer, S1, RBD and/or S2.

[2398] Binding data (presented as deltaF) for a selection of these antibody clones are shown in Table E2-2.

TABLE E2-2
HTRF binding to SARS-COV-2 spike protein subunits.
HTRF deltaF values for binding of antibody
clones to the RBD domain, the S1 subunit,
the S2 subunit and the full-length stabilised spike
trimer protein of SARS-COV-2 virus.

| | Binding | Binding | Binding | Binding |
|---|---|---|---|---|
| Clone | trimer | RBD | S1 | S2 |
| IMPI-004 | 952.1 | 1169.9 | 1749.3 | 19.2 |
| IMPI-029 | 1704.1 | 1175.7 | 3053.1 | 4.1 |
| IMPI-056 | 1627.1 | 1262.7 | 2996.8 | 2.1 |
| IMPI-047 | 1414.2 | 899.2 | 2254.6 | 4.3 |
| IMPI-005 | 1361.0 | 608.5 | 1507.4 | −1.8 |
| IMPI-006 | 1061.4 | 330.6 | 885.1 | 40.7 |
| IMPI-055 | 550.8 | 983.3 | 1031.2 | −10.3 |
| IMPI-054 | 563.4 | 818.2 | 772.5 | 15.8 |
| IMPI-017 | 549.6 | 894.4 | 752.5 | 13.0 |
| IMPI-059 | 403.0 | 882.3 | 568.8 | −2.7 |
| IMPI-037 | 556.6 | 468.1 | 625.9 | −2.0 |
| IMPI-060 | 488.3 | 217.1 | 377.6 | 6.0 |
| IMPI-013 | 1420.4 | −10.9 | −2.8 | 684.2 |
| IMPI-028 | 480.1 | 108.0 | 253.7 | 1.3 |
| IMPI-027 | 800.4 | 318.1 | 755.2 | 7.5 |
| IMPI-033 | 884.5 | 454.2 | 929.3 | −3.6 |
| IMPI-021 | 961.8 | 596.6 | 1279.2 | −0.3 |
| IMPI-032 | 217.7 | 4.0 | −8.9 | −8.0 |
| IMPI-038 | 1307.9 | 544.4 | 1443.8 | −4.3 |
| IMPI-022 | 483.0 | −2.4 | −5.8 | −9.7 |
| IMPI-024 | 1461.1 | 225.3 | 799.4 | −15.4 |
| IMPI-002 | 912.7 | 172.1 | 541.0 | −5.8 |
| IMPI-052 | 1134.4 | 228.8 | 732.2 | −15.9 |
| IMPI-042 | 925.8 | 121.4 | 616.7 | 1.6 |
| IMPI-063 | 968.5 | −7.3 | −0.4 | 410.6 |
| IMPI-067 | 962.8 | −5.4 | 3.1 | 4.6 |
| IMPI-068 | 1595.6 | 42.3 | 612.9 | 1.4 |

Materials and methods for HTRF binding assays

[2399] Supernatants collected from suspension CHO cells transfected with expression vectors encoding human IgG1 heavy and light chains were screened for binding to the RBD domain (Acro Biosystems SPD-C52H3), the S1 subunit (Sino Biological 40591-V08H), the S2 subunit (Sino Biological 40590-V08B) and the full-length stabilised spike trimer protein (in-house) of SARS-CoV-2 virus. All proteins included a His tag. 5 μL/well of supernatants normalised between 1 and 2 μg/mL were plated into 384 well white HTRF plates (Greiner 784904-012). 5 μL/well of positive control (Sino Biological anti-SARS-COV-2 RBD antibody 40150-D001 for RBD, S1 and trimer binding assays; Sino Biological anti-SARS-COV-2 S2 antibody 40590-D001 for S2 binding assay) and negative control (non-binding human IgG1, in-house) antibodies were added to the required wells in expression medium (Gibco A1383502). Positive and negative control antibodies were added respectively at 1.2 nM, 1.2 nM, 2 nM and 4 nM for the RBD, the S1, the S2 and the trimer binding assays to give final concentrations of 0.3 nM, 0.3 nM, 0.5 nM and lnM. 5 μL/well of RBD diluted at 4 nM, S1 at 40 nM, S2 at 20 nM or spike trimer at 20 nM in HTRF buffer (PBS (Gibco 14190250, 0.1% BSA (Sigma A7906), 0.53M KF (Sigma 60238-100G-F)) were added on top on the supernatants to give final concentrations of 1 nM, 10 nM, 5 nM and 5 nM. After a 30-min incubation at room temperature, 10 μL/well of an anti-Histidine d2 monoclonal antibody (Cisbio 61HISDLB) diluted at 13.3 nM in HTRF buffer together with an anti-human IgG Europium cryptate polyclonal antibody (Cisbio 61HFCKLB) diluted respectively at 0.42 nM, 1.67 nM, 0.83 nM and 1.67 nM for the RBD, the S1, the S2 and the spike trimer binding assays were added to the wells. Plates were left to incubate at room temperature for 2 hours for the RBD, the S1 and the S2 binding assays and for 4 hours for the spike trimer binding assay. Plates were then read on the Envision (Perkin Elmer) using 320 nm for excitation and detecting fluorescence at 665 and 620 nm.

TABLE E2-3
Reagent concentrations for HTRF assay

| | Final | Final | Final |
|---|---|---|---|
| | concentration | concentration | concentration |
| | of Spike | of anti-His | of anti-human |
| HTRF Binding Assays | protein | d2 antibody | IgG antibody |
| Binding to RBD | [RBD] = 1 nM | 6.67 nM | 0.21 nM |
| Binding to S1 | [S1] = 10 nM | 6.67 nM | 0.83 nM |
| Binding to S2 | [S2] = 5 nM | 6.67 nM | 0.42 nM |
| Binding to spike trimer | [trimer] = 5 nM | 6.67 nM | 0.83 nM |

[2400] The selection of hits was based on a histogram generated using Genedata Biologics (Genedata) representing the overall distribution of the Delta F values obtained for all the wells in individual binding assays. The selection criteria for each binding assay (“cut-off”) (Delta F, summarised in Table E2-1) is visually applied at the tail of the histogram when the frequency of hits decreases. Any clone positive in at least one of the HTRF assays was carried forward to a secondary screening stage.

$$Calculation of HTRF ratio for primary screening : \text{} \\ HTRF Ratio = \frac{Fluorescence at 665 nm}{Fluorescence at 620 nm} \times 10000 \qquad Equation 1$$

$$Calulation of Delta F for HTRF binding assays : Delta F = \frac{( HTRF {Ratio}_{sample} - HTRF {Ratio}_{minimum} )}{( HTRF {Ratio}_{minimum} )} \times 100 \qquad Equation 2$$

[2401] Minimum signal (HTRF Ratioₘᵢₘₘᵤₘ) is obtained from wells containing spike protein and the negative control antibody.

### Example 3. HTRF RBD:ACE2 Neutralisation Assays

[2402] The 492 selected antibodies from Example 1 were screened for their capacity to neutralise the binding between the RBD domain of the spike protein of SARS-CoV-2 virus and its ligand the human ACE2 protein. ACE2 is the cell surface protein targeted by the virus for binding and entry to the cells, thus serving as a receptor for the spike protein. All antibodies were initially screened as supernatants at a single concentration (summary shown in Table E3-1). Four batches of screening were performed, with hits (antibodies that passed the selection criteria) as follows:

TABLE E3-1
Summary of number of primary hits fulfilling the selection cut-
off resulting from HTRF RBD:ACE2 neutralisation screening

| | 151 clones | | | 83 clones | | | | |
|---|---|---|---|---|---|---|---|---|
| | Selection | No. | Selection | No. | Selection | No. | Selection | No. |
| Assay | criteria | hits | criteria | hits | criteria | hits | criteria | hits |
| Neutralisation | % Effect < 89 | 21 | % Effect < 100 | 16 | % Effect < 111 | 8 | % Effect < 105 | 5 |
| RBD/ACE2 | | | | | | | | |

[2403] Supernatants from 263 antibody-expressing CHO cells passed initial primary screening in the HTRF binding assay of Example 2 and/or in the above neutralisation assay of Example 3. These 263 antibodies were purified and re-screened again as full titrations to generate IC50 values in the RBD:ACE2 neutralisation assay. Results and IC50 values (where it was possible to calculate) for a selection of these antibodies are shown in Table E3-2.

TABLE E3-2
HTRF neutralisation IC50 values

| | Neutralisation | Neutralisation Spike |
|---|---|---|
| Clone | RBD:ACE2 (IC50, M) | trimer:ACE2 (IC50, M) |
| IMPI-004 | 2.42E−09 | 4.09E−09 |
| IMPI-029 | 1.26E−09 | 3.31E−09 |
| IMPI-056 | 1.93E−09 | 3.73E−09 |
| IMPI-047 | 3.36E−09 | 7.30E−09 |
| IMPI-005 | 3.18E−09 | 1.31E−08 |
| IMPI-006 | Below threshold | inactive |
| IMPI-055 | 3.39E−09 | 4.50E−09 |
| IMPI-054 | 2.28E−09 | 1.16E−08 |
| IMPI-017 | 8.32E−10 | 3.15E−09 |
| IMPI-059 | 2.02E−09 | 8.38E−09 |
| IMPI-037 | 7.76E−09 | 1.37E−08 |
| IMPI-060 | Below threshold | 5.26E−09 |
| IMPI-013 | | Below threshold |
| IMPI-028 | | inactive |
| IMPI-027 | | Increased binding |
| IMPI-033 | | Increased binding |
| IMPI-021 | 4.87E−09 | Yes |
| IMPI-032 | | Yes |
| IMPI-038 | | Increased binding |
| IMPI-022 | | inactive |
| IMPI-024 | inactive | Increased binding |
| IMPI-002 | 8.15E−09 | Yes |
| IMPI-052 | 4.85E−09 | Yes |
| IMPI-042 | 5.54E−09 | Yes |
| IMPI-063 | | inactive |
| IMPI-067 | | Below threshold |
| IMPI-068 | | Increased binding |

“Below threshold” indicates that there was some neutralising activity but not enough to generate an IC50 value.
“Yes” indicates the antibody was tested at single concentration and there was neutralising activity, but a full titration was not performed so that IC50 values could be calculated.
“Increased binding” indicates that an increase in binding between ACE2:trimer (rather than blocking or no activity) was observed.
“Inactive” indicates that no significant neutralisation activity was observed in this specific assay.
Blank indicates that the antibody was not tested in the assay.
IMPI-013 and IMPI-063 (S2 binders) and IMPI-032, IMPI-022 and IMPI-067 (trimer binders) were not tested in the RBD:ACE2 neutralisation assay as they do not bind to RBD.

[2404] The assay using the isolated RBD domain categorised the antibodies as either neutralising or non-neutralising for the interaction between RBD and ACE2. The IC50 values of antibodies which were determined to be neutralising antibodies are shown in Table E3-2, that is a numeric IC50 value in Table E3-2 is a neutralising antibody. Antibodies which were determined to be non-neutralising for RBD in this assay are also indicated (“inactive”). Note that antibodies that do not function by inhibition of RBD and ACE2 binding will be ‘inactive’ in this assay, however, it does not mean the antibodies will be inactive in other assays.

[2405] To check for neutralising activity in antibodies that do not bind ACE2, a subset of antibodies were also tested in an HTRF assay that measures neutralisation between the full soluble trimer protein and ACE2. The assay using the spike trimer protein categorised the antibodies as (i) neutralising the spike:ACE2 interaction, (ii) not neutralising the spike:ACE2 interaction or (iii) potentiating the spike:ACE2 interaction (Table E3-2).

[2406] Neutralising antibodies were IMPI-004, IMPI-029, IMPI-056, IMPI-47, IMPI-005, IMPI-006, IMPI-055, IMPI-054, IMPI-017, IMPI-059, IMPI-037, IMPI-060, IMPI-013, IMPI-021, IMPI-032, IMPI-002, IMPI-052, IMPI-042, IMPI-067.

[2407] Non-neutralising antibodies were IMPI-028, IMPI-022, IMPI-063.

[2408] Agonist-type antibodies were IMPI-027, IMPI-033, IMPI-038, IMPI-024, IMPI-068.

[2409] With reference to FIG. 10, IMPI-059 is an ACE2 competing neutralising antibody in this assay and shows a typical sigmoid titration curve, neutralising binding of the spike protein to ACE2 in a dose-dependent manner. IMPI-027 exhibits an unusual agonist-like activity profile, with increased binding of spike to ACE2 being observed in the presence of the antibody, in a dose-dependent manner. The same agonist-like phenomenon was seen for IMPI-024 and IMPI-068. FIG. 11. IMPI-033 and IMPI-038 behaved similarly.

[2410] As discussed elsewhere herein, a non-neutralising antibody or an agonist-type antibody may be useful therapeutically as combinations if the antibodies induce a destabilised trimeric spike protein, if they neutralise virus infection in pseudotype assays and/or live virus assays by an unusual mechanism or if they synergise with antibodies that neutralise RBD binding to ACE2.

[2411] Non-neutralising antibodies and neutralising antibodies are expected to bind to different regions of the RBD, and thus are useful in combination in DABA assays as described elsewhere herein.

[2412] Antibodies which potentiate binding between ACE2 and spike trimer protein may be especially valuable as capture antibodies for use in combination with anti-RBD antibodies which bind to different regions of the spike protein (e.g., in combination with anti-RBD antibodies which do not neutralise the ACE2:spike interaction). The potentiating antibodies may enhance binding of anti-RBD antibodies to the spike protein, thus enhance the sensitivity of detection of spike protein in a diagnostic assay.

Materials & Methods: Primary screening of antibody supernatants for neutralisation of RBD:ACE2

[2413] Supernatants collected from suspension CHO transfected with expression vectors encoding human IgG1 heavy and light chains as above were screened for neutralising the binding between the RBD domain (Acro Biosystems SPD-C52H3) of the spike protein of SARS-CoV-2 virus and its ligand the human ACE2 protein, used here directly labelled with Alexa Fluor 647. 5 μL/well of supernatants normalised between 10 and 20 μg/mL were plated into 384 well white HTRF plates (Greiner 784904-012). 5 μL/well of positive (Sino Biologicals 40150-D001) and negative control (human IgG1, in-house) antibodies were added to the required wells in expression medium (Gibco A1383502). Positive and negative control antibodies were added at 40 nM to give a final concentration of 10 nM. 5 μL/well of RBD protein diluted at 40 nM in HTRF buffer (PBS (Gibco 14190250, 0.1% BSA (Sigma A7906), 0.53M KF (Sigma 60238-100G-F)) were added on top on the supernatants to give a final concentration of 10 nM. After a 30-min incubation at room temperature, 5 μL/well of AF647-labelled human ACE2 diluted at 20 nM in HTRF buffer to give a final concentration of 5 nM was added to the wells followed 30-min later, by the addition of 5 μL/well of an anti-Histidine Europium cryptate monoclonal antibody (Cisbio 61HISKLB) diluted at 5.3 nM in HTRF buffer to the wells. Plates were left to incubate at room temperature for 2 hours and then read on an Envision plate reader (Perkin Elmer) using 320 nm for excitation and detecting fluorescence at 665 and 620 nm.

[2414] The selection of hits was based on a histogram generated using Genedata Biologics (Genedata) representing the overall distribution of the % Effect values obtained for all the wells in the neutralisation assay. The selection criteria (% Effect, summarised in Table E3-1) is visually applied at the tail of the histogram when the frequency of hits decreases. Any clone positive in the RBD:ACE2 neutralisation primary HTRF screen was carried forward to a secondary screening stage.

$$Calculation of \% of Effect for HTRF neutralisation assay : \\ \% Effect = \frac{( HTRF {Ratio}_{sample} - HTRF {Ratio}_{minimum} )}{( HTRF {Ratio}_{maximum} - HTRF {Ratio}_{minimum} )} \times 100 \qquad Equation 3$$

[2415] Wells containing 5 nM of AF647 ACE2, 10 nM of spike RBD and 10 nM of human IgG1 isotype control are referred to as maximum signal (HTRF Ratioₘₐₓᵢₘᵤₘ) and wells containing 5 nM of AF647 ACE2, 10 nM of spike RBD and 10 nM of positive control antibody (Sino Biological 40590-D001) as minimum signal (HTRF Ratioₘᵢₙᵢₘᵤₘ).

### Materials & Methods: Secondary Screening of Purified Clones for Neutralisation of RBD:ACE2

[2416] Purified antibodies identified during primary screening were screened again for neutralisation of the binding between the RBD domain (Acro Biosystems SPD-C52H3) of the spike protein of SARS-CoV-2 virus and its ligand the human ACE2 protein, used here directly labelled with Alexa Fluor 647 (in house). Purified antibodies as well as positive (Sino Biologicals 40150-D001) and negative control (human IgG1, in-house) antibodies were titrated in elution buffer (30 mM Formate, 75 mM Tris pH 7) 3-fold, 8-point dilution in duplicates starting from 360 nM to reach a final range of concentrations from 90 nM to 41 pM. Positive and negative control antibodies were also diluted at 40 nM to give a final concentration of 10 nM. 5 μL/well of titrated antibodies were plated into 384 well white HTRF plates (Greiner 784904-012). 5 μL/well of RBD protein diluted at 40 nM in HTRF buffer (PBS (Gibco 14190250, 0.1% BSA (Sigma A7906), 0.53 M KF (Sigma 60238-100G-F)) were added to the wells to give a final concentration of 10 nM. After a 30-min incubation at room temperature, 5 μL/well of AF647-labelled human ACE2 diluted at 20 nM in HTRF buffer to give a final concentration of 5 nM was added to the wells followed 30-min later, by the addition of 5 μL/well of an anti-Histidine Europium cryptate monoclonal antibody (Cisbio 61HISKLB) diluted at 5.3 nM in HTRF buffer to the wells. Plates were left to incubate at room temperature for 2 hours and then read on an Envision plate reader (Perkin Elmer) using 320 nm for excitation and detecting fluorescence at 665 and 620 nm.

$$Calculation of \% of neutralisation for HTRF neutralisation assay : \\ \% Neutralisation = 100 - \frac{( HTRF {Ratio}_{sample} - HTRF {Ratio}_{minimum} )}{( HTRF {Ratio}_{maximum} - HTRF {Ratio}_{minimum} )} \qquad Equation 4$$

[2417] Wells containing 5 nM of AF647 ACE2, 10 nM of spike RBD and 10 nM of human IgG1 isotype control are referred to as maximum signal (HTRF Ratioₘₐₓᵢₘᵤₘ) and wells containing 5 nM of AF647 ACE2, 10 nM of spike RBD and 10 nM of positive control antibody (Sino Biological 40590-D001) as minimum signal (HTRF Ratioₘᵢₙᵢₘᵤₘ).

[2418] IC50 values for purified antibodies (summarised in Table E3-2) were determined using Prism 8 (GraphPad) whereby the calculated % neutralisation for each antibody dose response was analysed using the non-linear regression, dose response, log (inhibitor) vs. response—variable slope (four parameters) in-built analysis.

### Materials & Methods: Secondary Screening of Purified Clones for Neutralisation of Spike Trimer:ACE2

[2419] Purified antibodies identified during primary screening were screened again for neutralisation of the binding between the full soluble spike trimer of SARS-CoV-2 virus and its ligand the human ACE2 protein, used here directly labelled with Alexa Fluor 647. Purified antibodies were titrated in elution buffer (30 mM Formate, 75 mM Tris pH 7) 10-fold, 2-point dilution in duplicates starting from 800 nM to reach a final range of concentrations of 200 nM and 20 nM. Positive (Sino Biologicals 40150-D001) and negative control (human IgG1, in-house) antibodies were also titrated in elution buffer 5-fold, 8-point starting from 2400 nM to reach a final range of concentrations of 600 nM to 7.68 pM. 5 μL/well of titrated antibodies were plated into 384 well white HTRF plates (Greiner 784904-012). 5 μL/well of spike trimer diluted to 20 nM in HTRF buffer (PBS (Gibco 14190250, 0.1% BSA (Sigma A7906), 0.53 M KF (Sigma 60238-100G-F)) was added to the wells to give a final concentration of 5 nM. After a 30-min incubation at room temperature, 5 μL/well of AF647-labelled human ACE2 diluted to 160 nM in HTRF buffer to give a final concentration of 40 nM was added to the wells followed 30-min later, by the addition of 5 μL/well of an anti-Histidine Europium cryptate monoclonal antibody (Cisbio 61HISKLB) diluted to 21.3 nM in HTRF buffer to the wells. Plates were left to incubate at room temperature for 4 hours and then read on an Envision plate reader (Perkin Elmer) using 320 nm for excitation and detecting fluorescence at 665 and 620 nm.

$$Calculation of \% of Effect and \% of neutralisation for neutralisation assay : \\ \% Effect = \frac{( HTRF {Ratio}_{sample} - HTRF {Ratio}_{minimum} )}{( HTRF {Ratio}_{maximum} - HTRF {Ratio}_{minimum} )} \times 1 \; 00 = 100 - \% Neutralisation \qquad Equation 3$$

[2420] Wells containing 40 nM of AF647 ACE2 and 5 nM of spike trimer are referred to as maximum signal (HTRF Ratioₘᵢₙᵢₘᵤₘ) and wells containing 40 nM of AF647 ACE2 alone as minimum signal (HTRF Ratioₘᵢₙᵢₘᵤₘ).

[2421] Antibodies identified to (i) neutralise the spike:ACE2 interaction and (iii) potentiate the spike:ACE2 interaction (Table E3-2) in the above assay were confirmed again in the spike trimer:ACE2 HTRF neutralisation assay, by performing titrations of purified antibodies in elution buffer (30 mM Formate, 75 mM Tris pH 7) 3-fold, 8-point dilution in duplicates starting from 800 nM to reach a final range of concentrations from 200 nM to 91.4 pM. IC50 values for purified antibodies (summarised in Table E3-2) were calculated using Prism 8 (GraphPad) whereby the calculated % neutralisation for each antibody dose response was analysed using the non-linear regression, dose response, log (inhibitor) vs. response—variable slope (four parameters) in-built analysis.

### Example 4. Pseudovirus Neutralisation Assay

[2422] The 255 trimer-binding antibodies which met the HTRF ΔF criteria described in Example 2, 4 further anti-S1 antibodies which met the HTRF ΔF criteria for S1 binding (but not for trimer binding) from Example 2, and 4 additional neutralising antibodies which were positive in the neutralising HTRF assay (see Example 3), provided a total of 263 candidate antibodies. We screened these further to evaluate their activity in a pseudovirus neutralisation assay using non-replication-competent pseudoviral particles with wild type SARS-CoV-2 spike trimer protein in the pseudoviral envelope.

[2423] Purified antibodies identified during primary HTRF screening as binding to SARS-Cov-2 spike trimer, were tested for neutralisation of the SARS-CoV-2 spike pseudovirus in a high throughput, 384-well format, cell-based viral neutralization assay developed at Kymab (adapted from Ferrera and Temperton, Methods Protoc. 2018 March; 1(1): 8). All trimer binders were initially tested as two-point titrations (100 nM and 10 nM) and all antibodies showing activity in this assay were run as full 8 point titrations, starting from 50 nM. Antibody titrations were incubated with SARS-CoV-2 pseudovirus particles encoding firefly luciferase before adding to Lenti-X 293 cells transiently transfected with DNA plasmids encoding human recombinant ACE2 and TMPRSS2. TMPRSS2 is a protease which cleaves the spike protein into its S1 and S2 subunits to allow the virus to attach to ACE2 and enter the cell. When the genome of the pseudovirus particles integrates into the host cell genome after entry into cells, firefly luciferase expression is proportional to the number of cells that were transduced. After 48 hrs incubation, the cells are lysed and comparison between the luciferase signals detected in cells only, in cells transduced with pseudotype virus only, and in cells transduced with pseudotype virus in the presence of antibodies, enables determination of neutralization activity against the pseudotype tested.

TABLE E4-1
Potency of antibodies in pseudovirus neutralisation assay

| | | IC50 | | Fold change |
|---|---|---|---|---|
| | IC50 | Confidence | IC50 | relative to SAD |
| Clone | (pM) | interval (pM) | (ug/ml) | S35 antibody |
| IMPI-059 | 3.2 | 2.38 to 4.24 | 0.0005 | 1407.84 |
| IMPI-017 | 9.0 | 6.64 to 12.1 | 0.0013 | 501.75 |
| IMPI-004 | 34.0 | 25.7 to 44.8 | 0.0051 | 132.43 |
| IMPI-055 | 36.2 | 21.5 to 57.8 | 0.0054 | 124.56 |
| IMPI-029 | 43.3 | 28 to 66.31 | 0.0065 | 104.11 |
| IMPI-056 | 82.2 | 48.4 to 137 | 0.0123 | 54.88 |
| IMPI-047 | 87.2 | 38.5 to 186 | 0.0131 | 51.69 |
| IMPI-054 | 94.5 | 42.5 to 194 | 0.0142 | 47.71 |
| IMPI-021 | 164.2 | 95 to 274 | 0.0246 | 24.28 |
| IMPI-002 | 343.9 | 113 to 895 | 0.0516 | 11.59 |
| IMPI-052 | 507.7 | 254 to 942 | 0.0761 | 7.85 |
| IMPI-005 | 530.5 | 308 to 889 | 0.0796 | 8.50 |
| IMPI-042 | 1441.5 | 727 to 2690 | 0.2162 | 2.77 |
| IMPI-013 | 2305.5 | 1070 to 4340 | 0.3458 | 1.73 |
| IMPI-028 | 2921.4 | 1040 to 8370 | 0.4382 | 1.36 |
| IMPI-060 | 6168.9 | 2440 to 15200 | 0.9253 | 0.73 |
| IMPI-024 | 6846.2 | 2410 to 31700 | 1.0269 | 0.58 |
| IMPI-063 | 9981.9 | 2330 to 270000 | 1.4973 | 0.35 |
| IMPI-068 | 13091.4 | 2100 to 1540000 | 1.9637 | 0.26 |
| IMPI-032 | 14862.7 | 6370 to 60500 | 2.2294 | 0.27 |
| IMPI-037 | 30672.1 | 7300 to 1200000 | 4.6008 | 0.15 |
| IMPI-027 | 31645.6 | 5320 to 3060000 | 4.7468 | 0.13 |
| IMPI-038 | 54979.4 | 13400 to 3020000 | 8.2469 | 0.07 |
| IMPI-067 | 72329.5 | 13600 to 1990000 | 10.849 | 0.05 |
| IMPI-022 | n/a | n/a | n/a | n/a |
| IMPI-006 | n/a | n/a | n/a | n/a |
| IMPI-033 | n/a | n/a | n/a | n/a |
| mAb A | 34.404 | 24.1 to 48.3 | 0.0052 | 151.72 |
| mAb B | 291.3 | 125 to 649 | 0.0437 | 17.92 |
| mAb C | 227.4 | 159 to 322 | 0.0341 | 22.96 |
| mAb D | n/a | n/a | n/a | n/a |
| 4A8 | 960.4 | 444 to 2200 | 0.1441 | 5.44 |
| SAD S35 | 5220 | 2770 to 9910 | 0.7830 | 1 |

[2424] Neutralisation potency of selected antibodies against SARS CoV2 pseudotype virus expressed as IC50 values in picomolar. Confidence intervals are indicated, and data expressed as fold change relative to SAD S35 antibody. n/a indicates antibody did not reach 50% neutralisation and IC50 cannot be calculated.

### Materials and Methods

### Generation of SARS-CoV-2 Recombinant Pseudotype Virus

[2425] Non-replicative pseudoparticles were generated using plasmids obtained from Dr Nigel Temperton, University of Kent (Hyseni et al Viruses 12(9):1011 2020). Plasmid pCAGGS-ACE2 contains the human ACE2 encoding sequence (GenBank: AB193259.1) in the expression vector pCAGGS. Plasmid pCAGGS-TMPRSS2 contains the human TMPRSS2 encoding sequence (NCBI Reference Sequence: NM_001135099.1) in the expression vector pCAGGS. Briefly, a total of 5×10^{6 Lenti-X} 293T cells (Clontech, 632180) were seeded overnight in 10 cm dishes in DMEM media containing 10% heat-inactivated fetal bovine serum (Gibco). The following day, the cells were transfected with 1 g of the spike expression plasmid, pcDNA 3.1-SARS2-spike, lg gag-pol (p8.9), and 1.5 g CSFLW (a DNA plasmid encoding lentivirus backbone with firefly luciferase as a reporter gene) using the lipofectamine Fugene (Promega cat #E2311) according to manufacturer's instructions. Supernatant containing pseudoparticles was collected at 48, 72 and 96h post transfection and sterile filtered using 0.45 uM cellulose acetate filters. Supernatant were either aliquoted and stored at −80° C. or concentrated further. If concentrating, supernatants were centrifuged at 6000g overnight and then the filtered supernatant was pooled in the desired volume and frozen at −80° C./liquid nitrogen. TCID50 (50% endpoint titre) of the viral pseudoparticles was then calculated using serial dilution according to Spearman-Karber method.

[2426] pCSFLW is the firefly luciferase reporter-expressing lentivirus-backbone plasmid, which produces the lentivirus modified RNA genome with a long terminal repeat, packaging signal, promoter firefly luciferase reporter gene. The pCSFLW is derived from pCSGW where the green fluorescent protein encoding gene is replaced by the firefly luciferase reporter gene.

### Target Cell Line

[2427] Lenti-X HEK293T cells expressing ACE2 and TMPRRS2 were used as the target cell for the pseudotype neutralisation assay. Cells were prepared 24 hours in advance for the assay. A total of 2.5×106 Lenti-X cells were seeded overnight in a T25 flask in DMEM media containing 10% heat-inactivated fetal bovine serum (Gibco). The following day the cells were transfected with 1 μg pCAGGS-ACE2 plasmid and 75 ng pCAGGS-TMPRSS2 plasmid using Fugene (Promega cat #E2311) transfection reagent according to manufacturer's instructions. After 24 hrs, cells were removed by trypsinisation and used for the pseudovirus neutralisation assay.

### 8-Point Titration Pseudovirus Neutralization Assay

[2428] The purified antibodies were initially diluted 5-fold in DMEM media containing 10% heat-inactivated fetal bovine serum (Gibco) in a 96-well plate. Antibodies were then further titrated into a 384 well plate at 8-point dilution in triplicates starting from 50 nM concentration to reach a final concentration of 0.64 pM. Positive (Sino Biologicals 40150-D001 and Acro Biosystems SAD-S35 monoclonal antibodies) and negative (human IgG1 antibody, in house) control antibodies were also diluted at the same concentrations. 15 μL/well of titrated antibodies were plated into 384 well plates. The following controls were used: cells only, cells and virus (no antibody), positive control antibody, negative control antibody. 15 μL/well of diluted pseudotyped virus was then added (except to the cells only control) at a concentration of 50-100 TCID₅₀. The plate was centrifuged at 500 rpm for 5 sees and the antibodies and pseudovirus left to incubate for 1 hour at 37° C. (5% CO₂). Lenti-X 293T cells transiently expressing recombinant human ACE2 and TMPRSS2 were then added to each well to obtain a final cell number of 5×10³ cells per well. The plate was centrifuged at 500 rpm for 5secs and left to incubate for 48 hours at 37° C. (5% CO₂). 35 ul of BrightGlo (Promega cat #E2610) was added to each well as the detection reagent. The plate was read on an Envision plate reader (Perkin Elmer) using X nm for excitation and detecting luminescence at x and x nm. The percent neutralization of each antibody was calculated based on the luciferase activity, normalised to cells only (100%) and virus/cells only (no antibody) as 0%.

### Example 5. Sars-Cov-2 Wild-Type Live Virus Neutralization Assay

[2429] The ability of antibodies to neutralize entry of wild type SARS-CoV-2 virus was assessed by neutralization assay on Vero-E6 cells. Antibody titrations were incubated with 100 TCID50 of SARS-CoV-2/England/IC19/2020 strain of virus (from Imperial College London) and incubated with Vero E6 cells for 5 days. Results for a selection of antibodies are presented in Table E5-1, expressed as the lowest dilution (as a pM concentration) that showed 100% virus neutralisation.

TABLE E5-1
Potency of antibodies in live virus neutralisation assay

| | SARS COV2 |
|---|---|
| | neutralisation |
| | (complete virus |
| Clone | inhibition, pM) |
| IMPI-004 | 391 |
| IMPI-029 | 781 |
| IMPI-056 | 781 |
| IMPI-047 | 781 |
| IMPI-005 | 1563 |
| IMPI-006 | 25000 |
| IMPI-055 | 391 |
| IMPI-054 | 391 |
| IMPI-017 | 781 |
| IMPI-059 | 1563 |
| IMPI-037 | 25000 |
| IMPI-060 | 12500 |
| IMPI-013 | 50000 |
| IMPI-028 | 12500 |

[2430] Neutralisation potency of selected antibodies against wild type SARS CoV2 virus expressed as complete virus inhibition values in picomolar.

[2431] We found excellent correlation between performance of anti-RBD antibodies in the pseudovirus assay and live virus assay, indicating that the pseudovirus neutralisation assay is a good surrogate for measuring inhibition of viral entry to cells. Potent activity in this assay indicates these antibodies may neutralise the entry of the virus into cells in vivo.

### Materials and Methods

[2432] SARS-CoV-2/England/IC19/2020 was isolated on Caco2 cells from a clinical sample collected from a patient admitted to St. Mary's Hospital in London, United Kingdom. Antibodies were serially diluted (from a starting concentration of 0.5-luM) in assay diluent consisting of DMEM (Gibco, Thermo Fisher Scientific) with 1% penicillin-streptomycin (Thermo Fisher Scientific), 0.3% BSA fraction V (Thermo Fisher Scientific) and 0.25 μg mL-1 TPCK trypsin (Worthington). Antibody dilutions were incubated with 100 TCID50 per well of SARS-CoV-2/England/IC19/2020 diluted in assay diluent for 1 h at RT and transferred to 96-well plates pre-seeded with Vero-E6 cells. A TCID50 (tissue culture infectious dose for 50% infection) is the amount of virus able to infect 50% of tissue culture cells in wells (i.e. 2/4, 4/8, 6/12) at a given dilution value of the virus). 100 TCID50s is therefore 100 times the TCID50. Antibody dilutions were performed in duplicate. Plates were incubated at 37° C., 5% C02 for 5 days before adding an equal volume of 2X crystal violet stain to wells for 1 h. Plates were washed, wells were scored for cytopathic effect and a 100% neutralization titre calculated as the highest antibody dilution at which full virus neutralization (no evidence of cell infection) occurred. As the starting antibody concentration is known, then the antibody dilution that resulted in complete virus inhibition is reported the concentration of antibody that results in 100% or complete virus neutralisation.

### Example 6. Surface Plasmon Resonance (Spr) Determination of Binding Affinity and Kinetics

[2433] SPR runs (single cycle kinetics) were carried out using Biacore 8K (Cytiva) on a chip (CM4 from Cytiva) with anti hFc antibody immobilised on the chip (Human antibody capture kit; Cytiva). The chip is a dextran-coated layer of gold, and the anti-hFc is attached using amine coupling. Buffer HBS-P+(Cytiva) was used as a running buffer. This buffer is at pH 7.4 and comprises 0.01 M HEPES (4-(2-hydroxyethyl)-1-piperazineethanesulfonic acid, 0.15 M NaCl and 0.05% v/v surfactant P20 in aqueous solution). Chip temperature was maintained at 25 degrees C.

[2434] IMPI antibodies were produced as human IgG1 by expression in CHO cells and were purified as previously described. Antibodies were captured at 1 ug/ml. Receptor binding domain (Neil King, University of Washington), S1 spike domain (Sino Biological),S1 spike domain D614G variant (Sino Biological), S2 spike domain (Sino Biological) or spike protein trimer (produced in house, either wild type as shown in FIG. 2A or containing PP mutation as shown in FIG. 2B3, and in both cases containing C-terminal trimerisation domain) were injected at 0.39, 1.56, 6.25, 25 and 100 nM for 120 s at 30 ul/min. Dissociation was monitored for 600 s. Chip surface was regenerated with 3M Magnesium Chloride. Reference and blank subtracted sensorgrams were fitted using 1:1 binding model (Biacore Insight Evaluation Software).

TABLE E6-1
Kinetic constants for isolated RBD measured by SPR

| | | | kD binding to |
|---|---|---|---|
| Clone | kₐ (1/Ms) | k_{d} (1/s) | RBD (M) |
| IMPI-004 | 2.01E+06 | 6.87E−04 | 3.41E−10 |
| IMPI-029 | 8.08E+05 | 1.57E−04 | 1.95E−10 |
| IMPI-056 | 5.84E+05 | 2.57E−04 | 4.40E−10 |
| IMPI-047 | 3.68E+05 | 8.78E−04 | 2.38E−09 |
| IMPI-005 | 2.30E+06 | 7.10E−03 | 3.09E−09 |
| IMPI-006 | 9.30E+09 | 8.19E+00 | 8.80E−10 |
| IMPI-055 | 2.75E+06 | 2.64E−03 | 9.59E−10 |
| IMPI-054 | 5.64E+05 | 6.27E−04 | 1.11E−09 |
| IMPI-017 | 5.22E+05 | 9.76E−04 | 1.87E−09 |
| IMPI-059 | 6.59E+06 | 4.26E−03 | 6.46E−10 |
| IMPI-037 | 2.50E+06 | 2.32E−02 | 9.28E−09 |
| IMPI-060 | 4.69E+05 | 2.77E−02 | 5.92E−08 |
| IMPI-013* | | | No binding |
| IMPI-028 | 5.34E+05 | 1.36E−02 | 2.56E−08 |
| IMPI-027 | 6.48E+09 | 2.63E+01 | 4.06E−09 |
| IMPI-033 | 2.20E+06 | 7.41E−03 | 3.37E−09 |
| IMPI-021 | 5.48E+05 | 4.43E−03 | 8.08E−09 |
| IMPI-032** | | | No binding |
| IMPI-038 | 4.20E+06 | 1.23E−02 | 2.92E−09 |
| IMPI-022** | | | No binding |
| IMPI-024 | 2.12E+06 | 1.34E−03 | 6.33E−10 |
| IMPI-002 | 1.82E+06 | 4.02E−02 | 2.21E−08 |
| IMPI-052 | 1.93E+06 | 2.54E−02 | 1.32E−08 |
| IMPI-042 | 5.36E+05 | 6.17E−04 | 1.15E−09 |
| IMPI-063* | | | No binding |
| IMPI-067** | | | No binding |
| IMPI-068 | 1.85E+06 | 7.50E−02 | 4.05E−08 |
| mAb A | 4.89E+06 | 4.00E−03 | 8.19E−10 |
| mAb B | 3.65E+06 | 3.31E−02 | 9.06E−09 |
| mAb C | 2.93E+06 | 3.39E−02 | 1.16E−08 |

Kₐ Association rate constant
K_{d} Dissociation rate constant
K_{D} Equilibrium dissociation constant
*IMPI-013 and IMPI-063 are S2 binders so this lack of RBD binding is as expected.
**IMPI-022, IMPI-032 and IMPI-067 are trimer-only binders which did not exhibit detectable binding to the isolated RBD by SPR.

[2435] Comparing the SPR data for the ACE-2 competing anti-RBD antibodies with the corresponding data for these antibodies in the pseudovirus neutralisation assays, we see that the antibodies which showed the most potent (<100 pM) neutralisation in the pseudoviral neutralisation assay also showed high affinity (sub nM KD, i.e., <1E09 M) as determined by SPR. This includes IMPI-059, IMPI-004, IMPI-029, IMPI-056, IMPI-006 and IMPI-055.

[2436] A selection of the best antibodies from the ACE-2 competing anti-RBD group were further assessed by SPR for binding to the full S1 subunit, S2 subunit and to the spike protein trimer.

[2437] In summary we found higher affinity binding to RBD compared with reference antibodies, no significant binding to S2. The IMPI antibodies all bound a mutant of the S1 subunit of the spike protein, D614G. D614G is located in the S 1 subunit downstream of the RBD. In the trimer protein this residue is positioned close to the interface with the S2 subunit. Despite its distance from the RBD, residue 614 does appear to be capable of influencing binding of at least some anti-RBD antibodies. Reference antibody mAb B, an ACE-2 competing anti-RBD antibody which binds to the side of the RBD domain, was observed to show a decrease in affinity to D614G. The D614G variant is a mutation that arose in the virus, observed near the beginning of the epidemic, which has gradually arisen to become the dominant variant of the virus. The significance of D614G is unclear but in some in vitro data suggests that this mutation makes the virus slightly more infectious, with more viral shedding, and since February 2020 this strain has become the most widespread form of the virus around the world. Therefore, binding to the spike protein comprising the D614G mutation is highly advantageous in antibodies intended for therapeutic use, as well as in diagnostics for detecting whether a sample is positive for SARS-CoV-2. Retention of binding to D614G strain by the IMPI antibodies is therefore encouraging for their use in the clinic.

TABLE E6-2
Kinetic constants measured by SPR for S2 binding
neutralising antibodies

| Clone | Analyte | kₐ (1/Ms) | k_{d} (1/s) | KD (M) |
|---|---|---|---|---|
| IMPI-013 | Trimer (wt) | 4.40E+04 | 2.95E−05 | 6.70E−10 |
| IMPI-013 | Stabilized trimer | 5.74E+04 | 1.72E−05 | 2.99E−10 |
| | (PP mutation) | | | |
| IMPI-013 | S2 | 9.33E+04 | 1.18E−05 | 1.26E−10 |
| IMPI-013 | S1 | No binding | | |
| IMPI-013 | RBD | No binding | | |
| IMPI-063 | Trimer (wt) | 4.11E+05 | 9.39E−04 | 2.29E−09 |
| IMPI-063 | S2 | 9.19E+09 | 7.77E+00 | 8.45E−10 |
| IMPI-063 | RBD | No binding | | |

[2438] The S2 binder IMPI-013 was highly specific for binding to the S2 domain. High affinity binding to the trimer (both wild type sequence and stabilised PP mutant form) and to the isolated S2 domain was observed for IMPI-013. IMPI-013 did not show detectable binding to either the full isolated S1 subunit or to the isolated RBD. It is notable that IMPI-013 shows a very low dissociation rate. Impressively, observation of the sensorgram showed that the majority of IMPI-013 remained associated with the S2 domain or trimer for a long time after binding, during a 10 minute dissociation period.

[2439] A second S2 binder, IMPI-063, also showed high specificity for binding to the S2 domain and bound to the wild type spike trimer protein, but showed no detectable binding to the isolated RBD domain. SPR was not performed for IMPI-063 with stabilised spike trimer or S1 domain.

### Example 7. Epitope Binning

[2440] For competition studies, a sandwich method on the CM4 chip with anti hFc antibody immobilised on the chip was used (i.e., same chip as used in Example 6). First, purified CHO-expressed human IgG1 antibody at 1 μg/mL was captured for 240 s at 10 μL/min. Chip surface was then blocked with 800 nM irrelevant control human antibody for 180 s at 30 μL/min, to block remaining Fc binding sites on the chip surface. Receptor binding domain was injected at 200 nM for 120 s at 10 uL/min. A second antibody was then injected at 200 nM for 150 s at 10 μL/min. Reference cell without the first antibody captured was used for subtraction. Sensorgrams were analysed using Biacore Insight Evaluation Software.

[2441] A selection of anti-RBD ACE-2 competitor IMPI antibodies were tested for inter-competition. Antibody IMPI-037 did not compete with the other antibodies tested. This antibody also showed relatively low potency in functional assays as described above. This antibody thus represents one “bin”. A second “bin” is represented by IMPI-006, as this competed with all tested antibodies except IMPI-004, IMPI-055 and IMPI-059. A third “bin” is represented by all other antibodies, which all competed with one another.

[2442] Antibody IMPI-037 is of particular interest in the present invention.

[2443] FIG. 12 shows the results of epitope binning competition study.

### Example 8. Spr Determination of Competition with Ace2 for Binding Spike Protein RBD

[2444] The ability of antibodies to compete with human ACE-2 for binding to RBD was determined by SPR using the protocol described above in Example 7, using a human ACE2-Fc fusion protein in place of the test antibody.

TABLE E8-1
SPR results for competition of antibodies
with ACE2 for binding to RBD.

| | RBD:ACE-2 competition |
|---|---|
| IMPI-004 | yes |
| IMPI-029 | yes |
| IMPI-056 | yes |
| IMPI-047 | yes |
| IMPI-005 | yes |
| IMPI-006 | yes |
| IMPI-055 | yes |
| IMPI-054 | yes |
| IMPI-017 | yes |
| IMPI-059 | yes |
| IMPI-037 | yes |
| IMPI-060 | yes |
| IMPI-028 | yes |
| IMPI-027 | no |
| IMPI-033 | no |
| IMPI-021 | yes |
| IMPI-038 | no |
| IMPI-024 | no |
| IMPI-002 | yes |
| IMPI-052 | yes |
| IMPI-042 | yes |
| IMPI-068 | no |
| SAD S35 | yes |

[2445] In general, the preliminary results from the HTRF study (Example 3) were confirmed. IMPI-004, IMPI-029, IMPI-056, IMPI-047, IMPI-005, IMPI-055, IMPI-054, IMPI-017, IMPI-059, IMPI-037, IMPI-021, IMPI-002, IMPI-052 and IMPI-042 were all confirmed to compete with ACE2 in both types of assay. Additionally, antibody IMPI-028 exhibited competition with human ACE-2 for binding to the RBD as determined by SPR.

### Example 9. Sars-Cov-2 Wild-Type Virus Neutralisation Assay by Foci-Reduction Assessment

[2446] Antibodies IMPI-004, IMPI-013, IMPI-017 and IMPI-059 were compared against reference mAbs COV2-2196 and COV2-2130 (Zost, S. J. et al. Potently neutralizing and protective human antibodies against SARS-CoV-2. Nature 2020 doi.org/10.1038/s41586-020-2548-6) in a neutralisation assay with live SARS-CoV-2. These two control mAbs COV2-2196 and COV2-2130 are presently (October 2020) clinical candidate therapeutic antibodies.

[2447] IMPI-059 was the most potent antibody in this assay, with an IC50 of 26 pM.

[2448] IMPI-004 had an IC50 of 13 ng/ml (86 pM).

[2449] IMPI-017 had an IC50 of 49 ng/ml (326 pM).

[2450] The S2 subunit binder, IMPI-013, had an TC50 of 3400 pM (3.4 nM).

[2451] FIG. 13 presents these results with a log scale of IC50.

[2452] In general, the data obtained in this live virus assay (complete neutralisation or IC50 values) compared well with those from the pseudovirus neutralisation assay. Similar potent neutralisation profiles were observed, although absolute IC50 values differed as would be expected.

[2453] Based on the data presented herein overall, IMPI-059 represents the strongest candidate antibody based on its performance as a monoclonal composition. This is an anti-RBD, ACE2 neutralising antibody. IMPI-004 may represent the next strongest choice in this category, again based on its performance as a monoclonal composition. IMPI-017 is an anti-RBD, ACE2 neutralising antibody with high potency in the pseudovirus assay and good performance in the 100% neutralisation live virus assay, suggesting it is an interesting antibody. The S2 binder, IMPI-013, is also of particular interest in view of its different mode of binding and activity, coupled with high specificity and its neutralising ability. Combinations of these antibodies could be potent beyond additivity.

### Materials & Methods:

[2454] For this foci (plaque) reduction neutralization assay, tests were performed using passage 4 of SARS-CoV-2 Victoria/01/2020 (Caly et al Med. J. Aust. 212, 459-462 2020). A virus suspension was added at an appropriate concentration to yield approximately 100 foci in a final assay well in DMEM containing 1% FBS (D1). Virus suspension at appropriate concentrations in D1 (60 l) was mixed with antibody (60 l) to give a final concentration of 10 μg ml—1, 2.5 μg ml—1, 0.625 μg ml—1, 0.156 μg ml—1, 0.039 μg ml—1, 0.0097 μg ml—1, 0.0024 μg ml—1, 0.00061 μg ml—1, 0.00015 μg ml—1, 0.000038 μg ml—1, and 0.0000095 g ml—1, and without antibody as the 100% control well in triplicate, in wells of a 24-well tissue culture plate, and incubated at room temperature for 30 min. Thereafter, 50 μl of antibody/virus complexes were added into Vero cells monolayer, in duplicate, in wells of a 96-well tissue culture plate incubated for 2 h at 37° C. before being overlain with 0.5 ml of D1 supplemented with carboxymethyl cellulose (1.5%). Cultures were incubated for a further 24 hours at 37° C. before foci were revealed by staining with anti-NP followed by anti-human IgG-HRP. NP (nucleoprotein) is a SARS-CoV2 specific protein that is present in infected cells and therefore a good antibody marker for detecting infected cells. TrueBlue peroxidase substrate was added and stained foci of infected cells were identified (stained foci of infected cells should be clearly visible in 5 min). The IC50 was calculated by assessing the number of foci plaques in the 100% control well and the reduction in foci numbers corresponding to each antibody concentration. The results can be analysed manually or by standard curve fitting methods allowing the interpolation or calculation of the antibody concentration required to cause a 50% decrease in the number of foci present in the wells (TC50).

### Example 10. Classification of RBD Binding Antibodies into Epitope Communities

[2455] In contrast to previous studies that classified mAbs using germline or structural information the RBD-reactive mAbs analysed here were instead distinguished by a competition profile created by high-throughput surface plasmon resonance (HT-SPR, Carterra). RBD-directed antibodies can be sorted into seven core “communities” (as described in Hastie et al., 2021), that are broadly defined by the competition profiles of each mAb to one another. Communities can be further divided into finer clusters and bins based on their discrete competition with other clusters and/or their ability to compete with ACE2. Twenty two IMPI antibodies were assigned to epitope communities (Table E10-1). Fifteen antibodies were assigned to epitope community RBD-2, six antibodies to RBD-5 and one to RBD-6 (IMPI-006) based on their epitope competition profiles.

[2456] To understand the position of each epitope community relative to the others negative stain electron microscopy was performed for representative antibodies across the different classes to determine the binding footprint on the Spike protein. The antibodies described here fall into three different classes. RBD-2 (community 2) mAbs compete with ACE2 and generally require the RBD to be in the “up” conformation for binding. The binding site for Group 2 mAbs is shifted from the centre of the ACE2 binding site towards the peak of the receptor binding motif. Most RBD-2 mAbs bind bivalently to a single spike trimer (in contrast to other mAbs that cross link multiple Spike trimers).

[2457] The epitope community is also characterised by the propensity of particular Spike mutations to escape antibody-mediated neutralization. Several new SARS-CoV-2 strains have continued to emerge from late 2020 and into 2021, some of which have been designed as variants of concern (VOC) by the World Health Organisation (WHO). The currently VOC strains listed by the WHO are: Alpha (B.1.1.7), Beta (B.1.351), Gamma (P.1), and Delta (B.1.617.2) strains. The Beta strain (also known as B.1.351 lineage) originated in South Africa and contains several mutations which may impact the binding of antibodies and vaccines. All antibodies were tested for neutralization using WA-1 strain and the VOC Beta/B.1.351. Most of the antibodies in RBD-2 were impacted by the mutations present in the Beta strain and showed a decrease in neutralizing potency to this strain (Table E10-1).

[2458] Antibodies in class 5 (RBD-5) bind to the outer face of the RBD and can do so in either the “up” or “down” configuration without steric hindrance. RBD-5 mAbs bind away from the receptor binding motif and toward the binding site for the S309 antibody and do not block ACE-2. RBD-5 mAbs that were neutralising often mediated cross-linking of Spike proteins (Hastie et el., 2021) which may provide a possible mechanism of neutralisation for these antibodies that do not block ACE-2. RBD-5 mAbs also showed broad resistance to nearly all virus mutations analysed in Hastie et al, 2021, indicating that these mAbs may be more useful clinically as they have wider breadth of response across different variant strains. Antibody IMPI-037 is particularly interesting as this retains potent neutralisation of the Beta variant strain.

[2459] Antibodies inthe RBD-6 class (IMPI-006) block ACE2 and bindto the inner face ofthe RBD. They require two RBDs (the binding RBD and adjacent RBD)to be inthe “up” configuration. Duetothe binding location away from the receptor binding motif, RBD-6 antibodies are also resistant to mutations in VOCs (Hastie et al., 2021), which makes them attactive as broad therapeutics.

[2460] Classification of antibodies into different epitope communities is based on their epitope binding site and could be important for identifying mAbs that could be combined together as cocktails and identifies those mAbs that are most likely to be resistant to virus strain variation.

TABLE E10-1
Assay data used to categorise antibodies into different communities

| | | SPR | SPR | Live virus | Live virus | RBD |
|---|---|---|---|---|---|---|
| | ACE2 | binding | binding | WA-1 strain | B.1.351 | binding |
| | blocking | to RBD | to NTD | IC50 | strain IC50 | epitope |
| Clone ID | (%) | (kD, M) | (kD, M) | (ng/ml) | (ng/ml) | community |
| IMPI-002 | 100 | 3.38E−08 | | 17 | 15670 | 2 |
| IMPI-004 | 99.88 | 8.42E−10 | 6.53E−07 | 0.32 | nt | 2 |
| IMPI-005 | 100 | 2.49E−08 | | 11 | 25000 | 2 |
| IMPI-006 | 96.76 | 1.91E−07 | | nt | 25000 | 6 |
| IMPI-013 | 2.43 | | | 190 | nt | nd (not RBD) |
| IMPI-017 | 97 | 2.25E−09 | 1.05E−06 | 10 | nt | 2 |
| IMPI-021 | 99.62 | 1.47E−08 | | 3 | 25000 | 2 |
| IMPI-022 | | | 6.03E−07 | 18 | 1609 | (not RBD) |
| IMPI-024 | 17.44 | 1.16E−09 | 6.60E−07 | 1001 | 1241 | 5 |
| IMPI-027 | 46.24 | 6.31E−09 | 2.91E−06 | 1817 | 5398 | 5 |
| IMPI-028 | 100 | 1.62E−07 | | 66 | 7435 | 2 |
| IMPI-029 | 97.91 | 4.46E−10 | 2.19E−07 | 2 | 25000 | 2 |
| IMPI-032 | | | | 7520 | nt | nd (not RBD) |
| IMPI-033 | 31.24 | 3.02E−09 | 1.82E−06 | 3671 | 8896 | 5 |
| IMPI-037 | 100 | 2.23E−08 | | 12 | 0.38 | 5 |
| IMPI-038 | 32.21 | 8.26E−10 | 4.75E−07 | 223 | 5894 | 5 |
| IMPI-042 | 99.26 | 1.87E−09 | 6.62E−07 | 12 | 25000 | 2 |
| IMPI-047 | 98.22 | 6.65E−09 | 2.32E−06 | 12 | 25000 | 2 |
| IMPI-052 | 100 | 2.41E−08 | | 10 | 3695 | 2 |
| IMPI-054 | 99.42 | 2.06E−09 | 6.02E−07 | 15 | 25000 | 2 |
| IMPI-055 | 100 | 1.85E−09 | 1.36E−06 | 0.32 | 25000 | 2 |
| IMPI-056 | 99.55 | 1.59E−09 | 6.82E−07 | 3 | 25000 | 2 |
| IMPI-059 | 100 | 2.30E−09 | 1.65E−06 | 0.32 | 3935 | 2 |
| IMPI-060 | 100 | 1.41E−07 | | 171 | nt | 2 |
| IMPI-063 | 4.46 | | | 10399 | nt | nd (not RBD) |
| IMPI-067 | | | 8.45E−08 | 2 | 25000 | nd (not RBD) |
| IMPI-068 | 33.87 | 9.47E−09 | 2.57E−06 | 2541 | 4507 | 5 |

K_{D} : Equilibrium dissociation constant.
nt: not tested. For the epitope community determination these antibodies (IMPI-067, IMPI-063, IMPI-022, IMPI-032, IMPI-013) were not RBD binding and could not be assigned to the RBD binding bins.

### Materials and Methods

### High-Throughput SPR Binding Kinetics

[2461] The binding kinetics measurements were performed on the Carterra LSA platform using HC30M sensor chips (Carterra) at 25 C. Two microfluidic modules, a 96-channel print-head (96PH) and a single flow cell (SFC), were used to deliver liquids onto the sensor chip. In each assay, a single analyte was titrated against multiple CoVIC antibody constructs. Full details are described in Hastie et al., 2021.

[2462] Goat anti-Human IgG Fc secondary antibody was first immobilized onto the chip through amine-coupling. Briefly, the chip was first activated by 100 mM N-Hydroxysuccinimide (NHS) and 400 mM 1-Ethyl-3-(3-dimethylaminopropyl) carbodiimide hydrochloride (EDC) (GE healthcare, mixed 1:1:1 with 0.1 M MES buffer at pH 5.5) for 600 seconds, followed by immobilization of anti-Hu IgG Fc (in 10 mM Sodium Acetate at pH 0.5) at 50 g/ml for 900 seconds. Unreactive esters were quenched with a 600-second injection of 1 M ethanolamine-HCl at pH 8.5. The chip was then exposed to double pulses (30 seconds per pulse) of 10 mM Glycine at pH 2.0. The IgG antibodies were then captured by the anti-Hu IgG Fc at 5 g/ml for 600 seconds using the 96PH, with 1X HBSTE buffer (10 mM HEPES pH 7.4, 150 mM NaCl, 3 mM EDTA and 0.01% Tween-20) as running buffer and antibody diluent. Each antibody construct at a given diluted concentration was immobilized onto 8 separate spots of the same chip, enabling replicating binding kinetics measurements.

[2463] A two-fold dilution series of the antigen was prepared in 1×HBSTE buffer. The top concentration for RBD, NTD and D614-HexaPro was respectively 40 μg/ml (1.11 M), 320 μg/ml (5.71 M) and 100 μg/ml (0.181 μM). A single antigen was used in each assay. The antigen at different concentrations was then injected using SFC onto the chip surface from the lowest to the highest concentration without regeneration, including several injections of buffer before the lowest non-zero concentration for signal stabilization. For each concentration, the data collection time-length for 42 baseline, association and dissociation were 120 seconds, 300 seconds and 900 seconds, respectively. For all assays the running buffer for titration was 1× HBSTE. The titration data collected were first pre-processed in the NextGenKIT (Carterra) software, including reference subtraction, buffer subtraction and data smoothing. The data were then exported and analyzed using the TitrationAnalysis tool. The RBD, NTD and D614-HexaPro binding time courses for each antibody construct immobilized on different spots were fitted to a 1:1 Langmuir model to derive ka, kd and KD values.

### High-Throughput SPR Epitope Binning

[2464] Epitope binning was performed with a classical sandwich assay format on a Carterra LSA®HT-SPR instrument equipped with a CMDP sensor chip at 25° C. and in a HBSTE-BSA running buffer (10 mM HEPES pH 7.4, 150 mM NaCl, 3 mM EDTA, 0.05% Tween-20, supplemented with 0.5 mg/ml BSA). Two microfluidic modules, a 96-channel print-head (96PH) and a single flow cell (SFC), were used to deliver samples onto the sensor chip. Surface preparation was performed with 25 mM MES pH 5.5 with 0.05% Tween-20 as a running buffer. The chip was activated with a freshly prepared solution of 130 mM 1-ethyl-3-(3-dimethylaminopropyl)carbodiimide (EDC)+33 mM N-hydroxysulfosuccinimide (Sulfo-NHS) in 0.1 M MES pH 5.5 using the SFC. Antibodies were immobilized using the 96PH for 10 minutes at 10 μg/mL diluted into 10 mM sodium acetate (pH 4.25). Unreactive esters were quenched with a 7-minute injection of 1 M ethanolamine-HCl (pH 8.5) using the SFC. The binning analysis was performed over this array with the HBSTE-BSA buffer as the running buffer and sample diluent. The RBD antigen was injected in each cycle for 4 minutes at 50 nM (1.8 μg/mL) and followed immediately by a 4-minute injection of the analyte antibody at 30 μg/mL (200 nM for IgG constructs). The surface was regenerated each cycle with double pulses (17 seconds per pulse) of 10 mM Glycine pH 2.0. Data was processed and analyzed with Epitope®768 software (Carterra).

### Negative-Stain EM to Define Antibody Binding Area

[2465] Full details are described in Hastie et al., 2021. Fabs were obtained for EM study using either IdeS (Promega) or papain (Sigma), and purified by ion exchange chromatography using a MonoQ column (GE). Fab (70 μg) or IgG (140 μg); were incubated with 140 μg purified HexaPro. D614G Spike ectodomain in TBS buffer overnight at room temperature. The final concentration for Spike or IgG in incubation solution was −0.25 μg/L. Spike-antibody complexes were purified by SEC with a Superdex 6 Increase 10/300 column (GE) and verified by SDS-PAGE. For each complex, 4 μL of sample (˜0.02 mg/mL) was applied to a CF400-Cu negative-stain grid (Electron Microscopy Sciences), and stained with 0.75% uranyl formate (Electron Microscopy Sciences). Between 50 and 400 micrographs were collected for each sample using a Titan Halo electron microscope (Thermo Fisher) and a Falcon 3EC direct electron detector at the magnification of 58,000X. EM-map reconstruction was performed using CryoSPARC and the maps were aligned and displayed using Chimera X. Specifically, models having different RBD status (One RBD up: PDB:7A94; Two RBDs up: PDB:7DCX; and Three RBDs up: PDB:7K4N), were fitted into NS-EM maps for antibody binding area identification.

[2466] ACE2—blocking assay ACE2 blocking was measured using Biolayer Interferometry (BLI) on an Octet HTX instrument (Sartorius) by covalently immobilizing SARS-CoV-2 RBD and Human Serum Albumin (HSA) (reference to subtract response due to non-specific interactions) onto Amine Reactive 2nd Generation (AR2G) biosensors (Sartorius). The data was analyzed using Data Analysis HT 12.0 (CFR11) software (Sartorius). The biosensors were activated with a freshly prepared solution of EDC (1-Ethyl-3-[3-dimethylaminopropyl]carbodiimide hydrochloride) and s-NHS (N-hydroxysulfosuccinimide) in molecular biology grade water. RBD and HAS were diluted in 10 mM sodium acetate pH 5 buffer and immobilized onto 96 separate sensors to a loading density threshold not to exceed A, =0.7 nm.

[2467] Unreactive NHS esters on the surface of the sensors were quenched with 1M ethanolamine pH 8.5. Antibody and ACE2 binding were performed sequentially by dipping the RBD and HSA loaded biosensors into a well plate containing antibodies at 20 μg/ml followed by a solution of recombinant ACE2 (human IgGFc fused at 27.5 μg/ml for 5 minutes each. The diluent used for preparing antibodies and ACE2 solution was 1× kinetics buffer (Sartorius).

[2468] ACE2 binding to immobilized RBD was monitored in real time in the absence and presence of antibodies pre-bound to RBD. The CoVIC reference mAbs CC12.3 and CC12.14, and control SARS-CoV-2 Spike Neutralizing mAb (Sino Biological) were included in each experiment as a positive control. The percent ACE2 blocking was calculated as the percentage of decrease in ACE2 binding due to antibodies pre-bound to RBD compared with the ACE2 binding to RBD untreated with any antibody (1x kinetics buffer in place of antibody). The average of ACE2 binding to antibody untreated RBD was set as 0% blocking. The ACE2 blocking percentages shown for the CoVIC antibodies are the mean of triplicate measurements. For full details see Hastie et al., 2021.

[2469] Live virus neutralisation of variant strains Neutralization of authentic SARS-CoV-2 carrying D614G (WA-1 strain) and B.1.351 by mAbs was assessed using a method similar to that described in Hou et al. 2020. Under BSL-3 containment, serially-diluted mAbs at 8 concentrations are incubated with 800 PFU/well nLuc virus for one hour at 5% CO2 and 37° C. After incubation, the virus/antibody mixtures are added in duplicate to black-walled 96-well plates containing Vero E6/C1008 cells (2×104 cells/well). Each plate also contains virus-only control wells. The plates are incubated for 24 hr at 37° C., 5% CO2 and the cells are lysed before measurement of luciferase activity with the Nano-Glo Luciferase Assay System (Promega) according to the manufacturer's instructions. Neutralization activity is expressed as the concentration at which the observed relative light units (RLU) are reduced by 50% relative to virus-only control wells.

### REFERENCES

[2470] Hastie KM, Li H, Bedinger D, Schendel SL, Dennison SM, Li K, Rayaprolu V, Yu X, Mann C, Zandonatti M, Diaz Avalos R, Zyla D, Buck T, Hui S, Shaffer K, Hariharan C, Yin J, Olmedillas E, Enriquez A, Parekh D, Abraha M, Feeney E, Horn GQ; CoVIC-DB team1, Aldon Y, Ali H, Aracic S, Cobb RR, Federman RS, Fernandez JM, Glanville J, Green R, Grigoryan G, Lujan Hernandez AG, Ho DD, Huang KA, Ingraham J, Jiang W, Kellam P, Kim C, Kim M, Kim HM, Kong C, Krebs SJ, Lan F, Lang G, Lee S, Leung CL, Liu J, Lu Y, MacCamy A, McGuire AT, Palser AL, Rabbitts TH, Rikhtegaran Tehrani Z, Sajadi MM, Sanders RW, Sato AK, Schweizer L, Seo J, Shen B, Snitselaar JJ, Stamatatos L, Tan Y, Tomic MT, van Gils MJ, Youssef S, Yu J, Yuan TZ, Zhang Q, Peters B, Tomaras GD, Germann T, Saphire EO. Defining variant-resistant epitopes targeted by SARS-CoV-2 antibodies: A global consortium study. Science. 2021 Sep 23:eabh2315. doi: 10.1126/science.abh2315. Epub ahead of print. PMID: 34554826.
[2471] Hou YJ, Okuda K, Edwards CE, Martinez DR, Asakura T, Dinnon KH 3rd, Kato T, Lee RE, Yount BL, Mascenik™, Chen G, Olivier KN, Ghio A, Tse LV, Leist SR, Gralinski LE, Schafer A, Dang H, Gilmore R, Nakano S, Sun L, Fulcher ML, Livraghi-Butrico A, Nicely NI, Cameron M, Cameron C, Kelvin DJ, de Silva A, Margolis DM, Markmann A, Bartelt L, Zumwalt R, Martinez FJ, Salvatore SP, Borczuk A, Tata PR, Sontake V, Kimple A, Jaspers I, O'Neal WK, Randell SH, Boucher RC, Baric RS. SARS-CoV-2 Reverse Genetics Reveals a Variable Infection Gradient in the Respiratory Tract. Cell. 2020 Jul. 23; 182(2):429-446.e14. doi: 10.1016/j.cell.2020.05.042. Epub 2020 May 27. PMID: 32526206; PMCID: PMC7250779.

### Example 11: In Vivo Protection in K18 Hace2 Transgenic Mouse Model

[2472] A subset of IMPI antibodies were tested for in vivo activity against SARS-CoV-2 live virus using the K18 transgenic mouse model. These mice are engineered to express the entry receptor for SARS-CoV-2, human angiotensin converting enzyme 2 (hACE2), to make them susceptible to SARS-CoV-2 infection. The virus strain used for infection is SARS-CoV-2 USA-WA1/2020, which was isolated in the USA in January 2020 and serves as the SARS-CoV-2 reference strain for the United States.

[2473] Antibodies were administered 1 day prior to infection in groups of 10 mice per antibody. Results were expressed as the percentage of mice that survived at 10 days post infection. Control mice (injected with PBS) showed 0% survival.

[2474] Twelve antibodies showed activity in this assay (Table E 11-1) with survival ranging from 10% to 100%. Three antibodies showed particularly potent in vivo activity: IMPI-055 and IMPI-004 provided 80% protection and IMPI-037 showed 100% protection at 1.5 mg/ml. IMPI-037 is of special interest as this antibody shows strong neutralising activity in vivo and as described in Example 10 it is resistant to mutations present in the Beta virus strain. IMPI-037 is in epitope community RBD-5 (see Example 10) and other antibodies in this group may also have similar properties.

TABLE E11-1
In vivo activity of antibodies against SARS-COV-2 in
K18 hACE2 transgenic mouse model

| | In vivo K18 (0.5 mg/mL) | In vivo K18 (1.5 mg/mL) |
|---|---|---|
| Clone | % survival | % survival |
| IMPI-004 | 10 | 80 |
| IMPI-017 | nt | 30 |
| IMPI-021 | nt | 20 |
| IMPI-022 | 60 | nt |
| IMPI-029 | 50 | nt |
| IMPI-037 | nt | 100 |
| IMPI-054 | 10 | nt |
| IMPI-055 | 80 | nt |
| IMPI-056 | 20 | nt |
| IMPI-059 | 10 | nt |
| IMPI-063 | 20 | nt |
| IMPI-067 | 20 | 40 |

nt: not tested

### Materials and Methods

[2475] Experiments were performed at Texas Biomedical Research Institute, as described in Oladunni et al., 2020. Briefly, SARS-CoV-2, USA-WA1/2020 strain (Gen Bank: MN985325.1), was obtained from BEI Resources (NR-52281) and virus stocks prepared in Vero E6 cells (ATCC, CRL-1586). Virus stocks were titrated by standard plaque assays (PFU/ml) in Vero E6 cells and validated by using next generation sequencing. K18 human angiotensin converting enzyme 2 (hACE2) transgenic mice, B6.Cg-Tg(K18-ACE2)2Prlmn/J (Stock No: 034860, K18 hACE2) were purchased from The Jackson Laboratory (Bar Harbor, ME).

[2476] K18 hACE2 transgenic and WT C57BL/6 mice were either mock (PBS)-infected (controls) or infected intranasally (i.n.) with 1×105 PFU of SARS-CoV-2 in a final volume of 50 μl following isoflurane sedation. After viral infection, mice were monitored daily for morbidity (body weight) and mortality (survival). Mice showing >25% loss of their initial body weight were defined as reaching experimental end-point and humanely killed.

[2477] Antibodies were administered 1 day prior to infection using doses of 0.5 mg/mL or 1.5 mg/mL using groups of 10 mice per antibody and results presented as the percentage of 10 animals that survived at 10 days post-infection.

### Reference:

[2478] Oladunni FS, Park JG, Pino PA, Gonzalez O, Akhter A, Allud-Guardia A, Olmo-Fontinez A, Gautam S, Garcia-Vilanova A, Ye C, Chiem K, Headley C, Dwivedi V, Parodi LM, Alfson KJ, Staples HM, Schami A, Garcia JI, Whigham A, Platt RN 2nd, Gazi M, Martinez J, Chuba C, Earley S, Rodriguez OH, Mdaki SD, Kavelish KN, Escalona R, Hallam CRA, Christie C, Patterson JL, Anderson TIC, Carrion R Jr, Dick EJ Jr, Hall-Ursone S, Schlesinger LS, Alvarez X, Kaushal D, Giavedoni LD, Turner J, Martinez-Sobrido L, Torrelles JB. Lethality of SARS-CoV-2 infection in K18 human angiotensin-converting enzyme 2 transgenic mice. Nat Commun. 2020 Nov. 30; 11(1):6122. doi: 10.1038/s41467-020-19891-7. PMID: 33257679; PMCID: PMC7705712.

### Example 12: Mouse Immunisations, Sample Collection and Serum Titer

[2479] In an additional study, Kymab mice, which have transgenic immunoglobulin loci containing human heavy and light chain gene segments, were immunized with SARS-CoV-2 spike in a variety of immunisation regimens and immunogenic formats, and antigen-specific B cells were selected from the immunised mice. Single B cells from spleen and lymph node samples were sorted using antigen specific probes. Immunogenic formats included (i) nucleic acid encoding full length spike or (ii) nucleic acid encoding full length spike protein with furin cleavage site mutation (GSAS substitution at residue 682-685). Sorting probes used were soluble trimeric spike extracellular domain protein comprising furin cleavage site mutation, double proline mutation and C-terminal T4 fibritin (foldon) trimerisation motif and full length trimeric spike protein presented with furin cleavage site mutation and double proline mutation on green fluorescent protein (GFP) virus like particles (VLPs) generated from host cells.

[2480] In a first study, 9,430 antigen specific B-cells were recovered after B cell sorting from immunised mice. From 303 of these B-cells, complete antibody heavy and light chain encoding nucleic acids were recovered and expressed as fully human IgG1 antibodies in mammalian host cells to be taken forward for screening.

[2481] In a second study, 10,332 antigen specific B cells were recovered after B cell sorting from immunised mice, and from 299 of these B-cells, complete antibody heavy and light chain encoding nucleic acids were recovered and expressed as fully human IgG1 antibodies in mammalian host cells to be taken forward for screening.

[2482] All antibodies taken forward for screening were expressed as fully human IgG1.

### Antigen/Immunogen Preparation

[2483] To generate purified proteins for use in sorting of B cells, DNA sequences were generated encoding ECD of trimeric spike protein containing furin cleavage site mutation (GSAS substitution at residue 682-685) and stabilising double proline (PP) mutations (K986 and V987). Coding sequence was fused with N-terminal leader sequence and C-terminal T4 fibritin (foldon) trimerization motif and His tag, codon optimised for mammalian expression and expressed in Expi293F cells. Protein was sequentially purified by a HisTrap HP column. Purified protein was analyzed by binding assays, and then aliquoted and stored at4° C.

[2484] Various antigen expressing stable cell lines were generated for different purposes. Antigen DNA sequence was cloned into an expression vector under the control of the CMV promoter flanked by 3′ and 5′ piggyBac specific terminal repeat sequences, which facilitated stable integration into the cell genome. The expression vector contained a puromycin selection cassette to facilitate stable cell line generation. Constructs were transfected into Expi293F cell line or HEK293T cell line, cultured under puromycin selection for 2 weeks and spike expression was validated by using flow cytometry to check for antigen surface expression using monoclonal antibodies. VLPs were generated from Expi293F cells stably co-expressing PP stabilized furin mutated trimeric spike with retroviral Group Antigens (gag) proteins and used for sorting specific B cells.

TABLE E12-1
Stable cell lines and expressing antigen

| Cell line | Expressing antigen |
|---|---|
| 293T - WT spike | Full length spike protein |
| 293T - WT spike, RFP | Full length spike protein, red fluorescence |
| | protein |
| 293T - spike FM, 18d | Full length spike protein with furin cleavage |
| | site mutation and C-terminal retention |
| | sequence 18 amino acid deletion |
| 293T - hACE2, | Full length human ACE2, full length human |
| TMPRSS2 | TMPRSS2 |
| 293T - hACE2, | Full length human ACE2, full length human |
| TMPRSS2, EGFP | TMPRSS2, enhanced green fluorescence |
| | protein |
| Expi293F - spike FM, | Full length spike protein with furin cleavage |
| 2P, 18d | site mutation, double proline mutation and |
| | C-terminal retention sequence 18 amino |
| | acid deletion |
| Expi293F - spike ECD | Extracellular domain of spike protein end at |
| | Q1208 with furin cleavage site mutation and |
| | double proline mutation, followed by T4 |
| | fibritin (foldon) trimerization motif and |
| | 6xHis tag |
| Expi293F - hACE2 ECD | Extracellular domain of human ACE2 end at |
| | S740 and followed by 6xHis tag |

### Example 13: Cell Binding Assay (Primary Screen)

[2485] The binding ofthe recovered antibodies (see Example 12) to the spike protein expressing cells was detected by flow cytometric analysis. All antibodies were tested in a single point assay at 5 μg/mL for their binding to the spike protein. Reference mAb A was included as the positive control for the staining in each assay. The binding of antibodies to two version of spike-expressing cell-lines, furin mutated spike (Expi293F-spike FM, 2P, 18d) and WT spike, were tested separately.

[2486] The 602 selected antibodies from Example 12 were screened. Among them, 508 were positive binders to furin mutated spike (Expi293F-spike FM, 2P, 18d) and 499 showed positive binding to WT spike. Criteria for passing this cell-based assay was that the geometric mean of the tested antibodies over the threshold set by the average geometric mean of isotype control plus three times of standard deviation.

### Materials and Methods

[2487] Supernatants collected from suspension Expi293F cells transfected with expression vectors encoding human IgG1 heavy and light chains were screened for binding to spike protein expressed on the cell surface. Two versions of spike expressing cell-lines, mutated spike and WT spike, were used in this screening. Twenty thousand cells from either cell-line resuspended in FACS buffer (PBS (Corning 21-040-CMR), 1% BSA (Sigma SI-A7906-100G), 2 mM EDTA (J.T. Baker 4040-01)) were plated into each well in 96-well V bottom plates (Greiner 651901) and incubated with 50 μL of collected supernatants normalized to 5 μg/mL or reference mAb A with 10 points of 3-fold dilutions starting from 15 μg/ml on ice for one hour. Before detection by secondary antibody, samples were washed once with FACS buffer to remove extra or non-binding antibodies. The anti-hIgG-AF647 (Jackson ImmunoResearch 109-606-170) was used as the detection antibody at the final concentration of 2 μg/mL. Samples were incubated with detection antibody on ice for additional 30 minutes in the dark followed by washing once with FACS buffer. Cells were then fixed with 2% paraformaldehyde (PBS (Corning 21-040-CMR), 4% paraformaldehyde (Alfa Aesar J61899) for 15 mins at room temperature. Samples were resuspended in 2 mM EDTA PBS buffer (PBS (Coming 21-040-CMR), EDTA (.T.Baker 4040-01) priorto analysis on Cytoflex (Beckman Coulter). The intensity of AF647 fluorochrome was acquired and calculated into the geometric mean of the fluorescence for downstream analysis.

### EXAMPLE 14: ANTIBODY BINDING BY HTRF

[2488] HTRF assay was used for primary screening to establish binding of the recovered antibodies (see Example 12) to purified spike proteins. All antibodies were screened in an initial single point assay at 0.5 μg/mL for binding to the RBD domain (Acro Biosystems SPD-C52H3), the NTD subunit (Acro Biosystems SlD-C52H6), and the S2 subunit (Acro Biosystems S2N-C52H5) of SARS-CoV-2 virus.

[2489] Criteria for passing the HTRF primary screen were that the antibody bound RBD domain, the NTD subunit, and the S2 subunit of SARS-CoV-2 virus with a ΔF value set out in Table E14-1.

TABLE E14-1
Summary of number of clones meeting primary screening
selection criteria for binding to RBD, NTD, and S2 subunits.

| | Screening batch 1: 303 clones | | Screening batch 2: 299 clones | |
|---|---|---|---|---|
| Assay | Selection criteria | No. hits | Selection criteria | No. hits |
| RBD | Delta F > 11 | 120 | Delta F > 9.5 | 69 |
| NTD | Delta F > 7 | 73 | Delta F > 5 | 93 |
| S2 | Delta F > 30 | 54 | Delta F > 4.2 | 129 |

Table details number of antibodies screened, number of positive hits, and associated cut-off values.

[2490] Based on these data, we characterised clones which met the HTRF binding criteria for RBD, NTD, or S2 subunits. Binding data (presented as delta F) for a selection of these antibody clones are shown in Table E14-2.

TABLE E14-2
HTRF binding to SARS-COV-2 spike protein subunits.

| Clone | Binding RBD | Binding NTD | Binding S2 |
|---|---|---|---|
| YANG-1112 | 1790.31 | 2.23 | 6.22 |
| YANG-1301 | 24.45 | 560.30 | 11.65 |
| YANG-1302 | −2.72 | 1255.41 | 28.18 |
| YANG-1401 | 1124.53 | 137.53 | 6.56 |
| YANG-2107 | 1853.07 | 2.40 | −2.19 |
| YANG-2108 | 2124.30 | −5.78 | −7.69 |
| YANG-2111 | 858.86 | −0.02 | −2.48 |
| YANG-2203 | 6.05 | 3.20 | 2247.39 |
| YANG-2204 | −3.24 | −6.44 | 1988.25 |
| YANG-2205 | −0.88 | −2.91 | 1952.91 |
| YANG-2206 | −4.93 | −3.96 | 2117.65 |
| YANG-2207 | 7.00 | 2.37 | 1631.78 |
| YANG-2208 | 5.09 | −0.40 | 2124.64 |
| YANG-2301 | −4.07 | 715.56 | −1.50 |
| YANG-2302 | −3.86 | 913.80 | 6.63 |
| YANG-2303 | 0.38 | 1229.03 | −1.33 |

HTRF delta F values for binding of representative antibody clones to the RBD domain, NTD, and S2 subunits of SARS-COV-2 virus.

### Materials and Methods

[2491] Supernatants collected from suspension Expi293 cells transfected with expression vectors encoding human IgG1 heavy and light chains were screened for binding to the RBD domain (Acro Biosystems SPD-C52H3), the NTD subunit (Acro Biosystems S1D-C52H6), and the S2 subunit (Acro Biosystems S2N-C52H5) of SARS-CoV-2 virus. All purchased proteins were in-house labelled with AF647 for HTRF assay. 5 μL/well of supernatants normalised to 0.5 μg/mL were plated into 384 well white HTRF plates (Greiner 784904-012). 5 μL/well of positive control (In-house produced mAb A for RBD binding assay; Leinco Technologies anti-SARS-COV-2 Spike NTD LT2000 for NTD binding assay; IMPI-013 for S2 binding assay) and negative control (non-binding human IgG1, in-house) antibodies were added to the required wells in Expi293 expression medium (Gibco A1435-01) to give the final concentration of lnM. 5 μL/well of RBD diluted at 80 nM, NTD at 80 nM, or S2 at 80 nM in HTRF buffer (PBS (Coming, 21-040-CMR, 0.1% BSA (Sigma SI-A7906), 0.53M KF (Sigma, UR-42216-500G) were added on top on the supernatants to give final concentrations of 20 nM. 10 μL/well of polyclonal Ab anti-human IgG-Eu Cyrptate (Cisbio 61HFCKLB) diluted at 0.25 ug/mL in HTRF buffer were added to wells. Plates were left at room temperature and incubated in the dark for 3 hours for RBD, NTD, and S2 binding assay. Plates were then read on a ClarioStar (BMG Labtech) using 330 nm excitation and detecting emission at 620 and 670 nm.

### Example 15: HTRF RBD:Ace2 Neutralization Assays

[2492] An HTRF assay was designed to screen for capacity of the recovered antibodies (see Example 12) to neutralize the binding between the RBD domain of the spike protein of SARS-CoV-2 virus and its ligand the human ACE2 protein. All antibodies were screened as supernatants at a single concentration of 10 μg/mL.

[2493] The 602 selected antibodies from Example 12 were screened and 51 clones showed neutralisation activity, based on a criterion of <50% effect in this assay.

### Materials and Methods

[2494] Supernatants collected from suspension Expi293F transfected with expression vectors encoding human IgG1 heavy and light chains as above were screened for neutralising the binding between the RBD domain (Acro Biosystems SPD-C52H3) of the spike protein of SARS-CoV-2 virus and its ligand the human ACE2 protein, used here directly labelled with Alexa Fluor 647. 5 μL/well of supernatants normalised to 10 μg/mL were plated into 384 well white HTRF plates (Greiner 784904-012). 5 μL/well of positive (mAB A) and negative control (non-binding human IgG1, in-house) antibodies were added to the required wells in Expi293 expression medium (Gibco A1435-01). Positive and negative control antibodies were added at 40 nM to give a final concentration of 10 nM. 5 μL/well of RBD protein diluted at 40 nM in HTRF buffer (PBS (Coming, 21-040-CMR, 0.1% BSA (Sigma SI-A7906), 0.53M KF (Sigma, UR-42216-500G)) were added on top on the supernatants to give a final concentration of 10 nM. After a 30-min incubation at room temperature, 5 μL/well of AF647-labelled human ACE2 diluted at 20 nM in HTRF buffer to give a final concentration of 5 nM was added to the wells followed 1-hour later, by the addition of 5 μL/well of an anti-Histidine europium cryptate monoclonal antibody (Cisbio 61HISKLB) diluted at 5.3 nM in HTRF buffer to the wells. Plates were left to incubate at room temperature for 2 hours and then read on a ClarioStar (BMG Labtech) using 330 nm excitation and detecting emission at 620 and 670 nm.

[2495] Calculation of % of Effect for HTRF neutralisation assay.

$$\% Effect = \frac{( HTRF {Ratio}_{sample} - HTRF {Ratio}_{minimum} )}{( HTRF {Ratio}_{maximum} - HTRF {Ratio}_{minimum} )} \times 100$$

[2496] Wells containing 5 nM of AF647 ACE2, 10 nM of spike RBD and 10 nM of human IgG1 isotype control are referred to as maximum signal (HTRF Ratioₘₐₓᵢₘᵤₘ) and wells containing 5 nM of AF647 ACE2, 10 nM of spike RBD and 10 nM of positive control antibody (Sino Biological 40590-D001) as minimum signal (HTRF Ratioₘᵢₙᵢₘᵤₘ).

### Example 16: Pseudovirus Neutralisation Assay

[2497] We screened all recovered antibodies (see Example 12) to evaluate their activity in pseudovirus neutralization assay using non-replication-competent pseudoviral particles with SARS-CoV-2 spike protein bearing furin mutation and truncation in retention sequence presented in the pseudoviral envelope.

[2498] The 602 selected antibodies from Example 12 were initially tested as two-point titrations (7 nM and 0.7 nM) in the pseudovirus neutralization assay. All tested antibodies were classified into 3 groups, RBD, NTD, and S2 binders, based on the results from HTRF subunit binding assay. In each category, antibodies were ranked by the activity of pseudovirus neutralization assay. The top 10 percent of the antibodies in each category, which in total is 59 antibodies out of 602 recovered antibodies, were selected and taken into a secondary screening phase.

### Materials and Methods

[2499] Generation of SARS-CoV-2 recombinant pseudotype virus Non-replicative pseudoparticles were generated using plasmids obtained from RNAi core, Academia Sinica, Taiwan. In brief, 293T stably expressing spike with furin mutation and truncation at the retention sequence, was seeded overnight in a 175T flask for reaching to 80% confluency. The following day, the cells were transfected with 55 g package plasmid (gag-pol), and 55 g pLAS2w.FLuc.Ppuro (a DNA plasmid encoding firefly luciferase as a reporter gene) using the Lipo3000 (Gibco L300-015) according to manufacturer's instructions. After overnight incubation, the culture medium was removed and replenished with DMEM medium containing 1% BSA to enhance the yield of virus. The virus containing supernatant, collected at 24 and 48 hours post transfection, was sterile filtered using 0.45 uM filter. The collected virus was aliquoted and stored at −80° C. for further usage.

Two-point Pseudovirus Neutralization Assay in primary screen

[2500] Antibodies purified from supernatant were tested for neutralisation of the SARS-CoV-2 spike pseudovirus in a 96-well format, cell-based viral neutralization assay. All antibodies were initially tested as two-point titrations (7 nM and 0.7 nM of final concentration). Antibody titrations were incubated with SARS-CoV-2 pseudovirus particles encoding firefly luciferase at 37° C. with 5% C02 for 1 hour before adding 50 thousand cells of 293T stable cell-line expressing human recombinant ACE2 and TMPRSS2. TMPRSS2 is a protease which cleaves the spike protein into its S1 and S2 subunits to allow the virus to attach to ACE2 and enter the cell. When the genome of the pseudovirus particles integrates into the host cell genome after entry into cells, firefly luciferase expression is proportional to the number of cells that were transduced. After 48 hrs incubation, the cells are lysed and comparison between the luciferase signals detected in cells only, in cells transduced with pseudotype virus only, and in cells transduced with pseudotype virus in the presence of antibodies, enables determination of neutralization activity against the pseudotype tested.

### Example 17: Epitope Binning

[2501] For a competition study, a premix assay with anti-hIgG Fc capture (AHC) biosensor was used and performed on Octet (Fortebio). First, 10 μg/mL of purified spike ECD was mixed with 50 μg/mL of monoclonal antibody (Ab2) at room temperature for 30 minute to form complex. Purified monoclonal antibody (Ab1) at 15 μg/mL was captured by AHC biosensor for 400 s to saturated. AHC sensor was then blocked with 15 μg/mL irrelevant control hIgG antibody for 200 s. Ag-Ab2 complex was added to Ab1 loaded biosensor to measure binding for 200s. Results were analyzed with Data Analysis HT 10.0 software.

[2502] The 59 antibodies met the selection criteria described in Example 17 were analysed for competition with reference antibodies. Among them, there were 32 anti-RBD antibodies, 12 anti-NTD antibodies, and 15 anti-S2 antibodies. Reference antibodies used for competition were IMPI-059 and mAb B for RBD, mAb E for NTD, and IMP-013 for S2.

[2503] The tested anti-RBD antibodies could be grouped into IMPI-059-like, mAb B-like, cross bin and unique antibodies. The anti-NTD and anti-S2 antibodies did not compete with the reference antibodies mAb E and IMPI-013 respectively.

TABLE E17-1
Anti-RBD antibodies grouped as competing binding
against reference antibodies.

| | IMPI-059- | mAb B- | Cross | Unique |
|---|---|---|---|---|
| | like | like | bin | antibody |
| No. of antibodies | 17 | 3 | 9 | 3 |

### EXAMPLE 18: 11-Point Titration Pseudovirus Neutralization Assay in Secondary Screen

[2504] Antibodies were tested in the pseudovirus neutralization assay with 11-point titrations. The purified antibodies were initially diluted 3-fold in DMEM media containing 10% heat-inactivated fetal bovine serum (Gibco) in a 96-well plate. Antibodies were then further titrated into a 96 well plate at 11-point dilution in duplicates starting from 100 nM of final concentration. Positive (mAb A, mAb B, and IMPI-059) control antibodies were also diluted at the same concentrations. 30 μL/well oftitrated antibodies were plated into Isoplate™ 96 well TC plates (PekinElmer 6005071). The following controls were used: cells only, and cells and virus (no antibody). 50 μL/well of pseudotype virus was then added (except to the cells only control). The plates containing the mixture of the antibodies and pseudotype virus were left to incubate for 1 hour at 37° C. with 5% CO₂. 293T cells stably expressing recombinant human ACE2 and TMPRSS2 were then added to each well to obtain a final cell number of 5×10⁴ cells per well. The plates were incubated at 37° C. with 5% CO2. After 48 hours incubation, culture medium was carefully removed and 100 μl of BrightGlo (Promega cat #E2610) was added to each well as the detection reagent. The plate was read on a ClarioStar (BMG Labtech) to detect luminescence intensity. The neutralization curve and IC₅₀ of each antibody was calculated using curve fitting program based on the luciferase activity, normalised to cells only (100%) and virus/cells only (no antibody) as 0%. Neutralisation potency (IC50) for representative clones against different domains is shown in Table E18-1.

TABLE E18-1
Potency of antibodies in pseudovirus neutralisation assay

| Clone | IC50 (nM) | Binding domain |
|---|---|---|
| YANG-1112 | 0.52 | RBD |
| YANG-1301 | 0.52 | NTD |
| YANG-1302 | 0.23 | NTD |
| YANG-1401 | 0.53 | RBD |
| YANG-2107 | 0.3 | RBD |
| YANG-2108 | 0.27 | RBD |
| YANG-2111 | 1.33 | RBD |
| YANG-2203 | 5.45 | S2 |
| YANG-2204 | 3.3 | S2 |
| YANG-2205 | 3.35 | S2 |
| YANG-2206 | 3.96 | S2 |
| YANG-2207 | 2.59 | S2 |
| YANG-2208 | 4.68 | S2 |
| YANG-2301 | 0.53 | NTD |
| YANG-2302 | 0.61 | NTD |
| YANG-2303 | 0.48 | NTD |

Neutralisation potency of selected antibodies against SARS COV2 pseudotype virus expressed as IC50 values in nanomolar.

### Example 19: Syncytia Inhibition Assay

[2505] Syncytia formation was observed in SARS-CoV-2 infected cells, including in vivo cell model and histopathologic lung sections. Spike proteins on infected cell surface binding to ACE2 on healthy cells could induce cell fusion. Recently, syncytia formation was reported not only to facilitate virus transmission, but also induce lymphocyte loss (Zhang, Z. et al., Cell Death Differ 28, 2765-2777 (2021)). We measured the ability of selected antibodies to inhibit the syncytia formation by cell-based syncytia formation assay.

[2506] 30 selected antibodies were assessed for their ability to inhibit syncytia formation. In combination with the potent anti-RBD antibody IMPI-059, eight antibodies showed comparable or superior inhibition of syncytia formation, as compared to the reference antibody combination mAb A and mAb B (FIG. 14). YANG-2204, YANG-2206, and YANG-2207 were the most potent antibodies in the syncytia inhibition assay.

### Materials and Methods

[2507] First, 104 of target cells (293T—hACE2, TMPRSS2, EGFP) were seeded to poly-D-lysine coated 96 well culture plates and incubated for 5 hours. The test antibody and IMPI-059 were diluted with sterile DPBS and mix to 200 nM for each antibody. Effector cells (293T—WT spike, RFP) were diluted to 2.5×10⁴ cells/mL with culture medium. Mixed 40 μL of effector cells and 10 uL of antibody mixture and incubated for 30 minutes on ice, then added to cultured target cells. After 2 days incubation, syncytia formation was checked under inverted fluorescence microscope. Cells were stained by NucBlue™ Live ReadyProbes™ Reagent (Invitrogen, Cat. R37605), fixed with 4% paraformaldehyde and washed with PBS. Plates were covered with aluminum foil and stored in fridge for high content imaging.

[2508] Image acquisition and analysis was performed on MetaXpress High content (Molecular Devices). Images of DAPI, GFP and TexasRed channel were acquired under 4× magnification and analyzed. Nucleus was defined by DAPI channel and cell was defined by GFP/TexasRed channel. Definition mask was set by size and intensity to identify nucleus, GFP expressing cell and RFP expressing cells. GFP and RFP colocalized cell was defined as syncytium. Syncytium formation percentage was calculated as nucleus counts in syncytia divided by nucleus counts in whole field.

[2509] Conclusions from additional study:

[2510] Results of from the study described in Examples 12 to 19 above are summarised in Table E19-1 below.

TABLE E19-1
Results of screening assays from additional antibody generation study

| | | | | | | | syncytia |
|---|---|---|---|---|---|---|---|
| | Affinity | | PV | | PV IC50 | | inhibition |
| | (SPR) by | | neutralization | PV | against | ACE2 | assay |
| mAb | Octet | | % (Ab 1 | neutralisation | mutant | inhibition | combined with |
| name | (nM) | epitope | ug/mL) | IC50 (nM) | (nM) | assay (%) | IMPI-059 (%) |
| YANG-1101 | <0.1 | RBD | 97.99 | | | 99.98 | |
| YANG-1102 | <0.1 | RBD | 86.92 | 0.84 | | 32.51 | |
| YANG-1103 | <0.1 | RBD | 100.05 | 0.28 | | 100.99 | |
| YANG-1105 | <0.1 | RBD | 97.16 | | | 91.44 | |
| YANG-1106 | <0.1 | RBD | 99.48 | | | 100.89 | |
| YANG-1107 | <0.1 | RBD | 99.23 | | | 100.39 | |
| YANG-1108 | <0.1 | RBD | 95.21 | | | 95.91 | |
| YANG-1109 | <0.1 | RBD | 99.44 | 1.81 | | 101.49 | |
| YANG-1110 | <0.1 | RBD | 99.35 | | | 100.76 | |
| YANG-1111 | <0.1 | RBD | 72.69 | 1.82 | | 36.6 | 16.54 |
| YANG-1112 | <0.1 | RBD | 89.22 | 0.52 | 0.34 | 93.41 | |
| YANG-1113 | <0.1 | RBD | 97.61 | | | 96.46 | |
| YANG-1114 | <0.1 | RBD | 93.16 | | | 84.29 | |
| YANG-1115 | <0.1 | RBD | 97.82 | | | 92.03 | |
| YANG-1116 | <0.1 | RBD | 99.24 | | | 100.45 | |
| YANG-1117 | <0.1 | RBD | 97.79 | | | 96.87 | |
| YANG-1118 | <0.1 | RBD | 99.32 | 0.25 | 2.76 | 101.18 | |
| YANG-1119 | <0.1 | RBD | 99.05 | 0.96 | | 90.47 | |
| YANG-1201 | <0.1 | S2 | 40.56 | N/A | | 5.43 | 14.84 |
| YANG-1202 | <0.1 | S2 | 51.93 | N/A | | 3.59 | 32.09 |
| YANG-1203 | <0.1 | S2 | 41.41 | N/A | | 3.27 | 22.04 |
| YANG-1204 | <0.1 | S2 | 44.76 | N/A | | 2.86 | 16.95 |
| YANG-1205 | <0.1 | S2 | 40.18 | N/A | | 1.14 | 20.76 |
| YANG-1206 | <0.1 | S2 | 45.87 | N/A | | 8.71 | 23.69 |
| YANG-1207 | <0.1 | S2 | 39.94 | N/A | | 11.03 | 23.42 |
| YANG-1301 | <0.1 | NTD | 60.44 | 0.52 | | 4.15 | 51.93 |
| YANG-1302 | <0.1 | NTD | 60.27 | 0.23 | 0.25 | −1.28 | 51.83 |
| YANG-1303 | <0.1 | NTD | 46.26 | N/A | | 3.51 | 46.57 |
| YANG-1304 | <0.1 | NTD | 41.46 | N/A | | 16.44 | 39.66 |
| YANG-1305 | <0.1 | NTD | 60.5 | 0.42 | | 6.15 | 41.72 |
| YANG-1401 | <0.1 | RBD | 91.64 | 0.53 | | 3.16 | |
| YANG-1402 | <0.1 | RBD | 94.45 | | | 7.18 | |
| YANG-1403 | <0.1 | RBD | 99.31 | | | 9.18 | |
| YANG-2101 | <0.1 | RBD | 99.96 | | | 100.79 | |
| YANG-2102 | <0.1 | RBD | 99.36 | | | 100.87 | |
| YANG-2103 | <0.1 | RBD | 97.66 | | | 101.96 | |
| YANG-2104 | <0.1 | RBD | 99.34 | | | 101.44 | |
| YANG-2105 | <0.1 | RBD | 99.61 | | | 101.46 | |
| YANG-2106 | <0.1 | RBD | 93.31 | | | 99.53 | |
| YANG-2107 | <0.1 | RBD | 61.2 | 0.3 | | 91.69 | 36.11 |
| YANG-2108 | <0.1 | RBD | 81.84 | 0.27 | 0.23 | 98.27 | 34.17 |
| YANG-2109 | <0.1 | RBD | 94.97 | 0.5 | | 95.13 | 13.43 |
| YANG-2110 | <0.1 | RBD | 99.92 | | | 101.89 | |
| YANG-2111 | <0.1 | RBD | 86.78 | 1.33 | 1 | 101.54 | 21.47 |
| YANG-2112 | <0.1 | RBD | 88.64 | 0.65 | | 29.13 | 29.03 |
| YANG-2201 | <0.1 | S2 | 35.21 | N/A | | −3.21 | −11.3 |
| YANG-2202 | <0.1 | S2 | 37.53 | N/A | | 4.17 | 4.15 |
| YANG-2203 | <0.1 | S2 | 35.69 | 5.45 | 32.46 | 4.38 | 32.15 |
| YANG-2204 | <0.1 | S2 | 40.99 | 3.3 | 8.83 | −2.49 | 52.03 |
| YANG-2205 | <0.1 | S2 | 47.55 | 3.35 | | 5.6 | 35.23 |
| YANG-2206 | <0.1 | S2 | 41.99 | 3.96 | 100 | 0.33 | 48.12 |
| YANG-2207 | <0.1 | S2 | 57.82 | 2.59 | 32.3 | 5.18 | 51.33 |
| YANG-2208 | <0.1 | S2 | 38.16 | 4.68 | | −6.02 | 41.67 |
| YANG-2301 | <0.1 | NTD | 56.43 | 0.53 | 0.4 | 1.45 | 47.9 |
| YANG-2302 | <0.1 | NTD | 52.16 | 0.61 | | −6.05 | 43.26 |
| YANG-2303 | <0.1 | NTD | 58.62 | 0.48 | | 0.27 | 45.9 |
| YANG-2304 | <0.1 | NTD | 52.82 | 0.74 | | 5.58 | 33.77 |
| YANG-2305 | <0.1 | NTD | 64.37 | 0.57 | | 29.71 | 34.78 |
| YANG-2306 | <0.1 | NTD | 60.36 | 0.43 | | 25.07 | 41.18 |

[2511] In this additional study to select antibodies against COVID-19 from Kymab mice, as described above in Examples 12 to 19, eleven potent candidate antibodies were identified as a lead panel, including five antibodies against RBD and six antibodies against S2 domain. Two strong anti-RBD antibodies YANG-1112 and YANG-2111 are of interest for not competing with any reference antibodies on binding, indicating the possible unique epitopes recognized by these two antibodies. Additionally, the anti-S2 antibodies YANG-2204, YANG-2206, and YANG-2207 represent the strongest candidates to inhibit the formation of syncytia, i.e., cell fusion, that could be used to pair with an antd-RBD antibody for combination therapy.

### SEQUENCES

### Table 1a

[2512] Table 1a below shows amino acid sequences of antibodies and encoding nucleic acids described in this specification. All IMPI VH domains, IMPI VL domains, IMPI CDRs, IMPI heavy chains and IMPI light chains, antibodies comprising them, as well as their encoding nucleic acids, represent examples of the present a invention. CDRs are determined according to IMGT method.

| SEQ | | | |
|---|---|---|---|
| ID | Clone | De- | |
| NO | ID | scription | Sequence |
| 1 | IMPI-052 | VH domain | GAGGTGCAGCTGGTGGAGTCTGGAGGAGGCTTGATCCAGCCTGGGGGGTCCCTGAGACTCTCCTGTGCAGCCTCTGG |
| | | nucleic | GGTCACCGTCAGTAGCAACTACATGAACTGGGTCCGCCAGGCTCCAGGGAAGGGGCTGGAGGGGGTCTCAGTTATTT |
| | | acid | ATAGTGGTGGTACCACATACTACGCAGACTCCGTGAAGGGCCGATTCACCATCTCCAGAGACAATTCCAAGAACACG |
| | | sequence | CTGTATCTTCAAATGAACAGCCTGAGAGCCGAGGACACGGCCGTGTATTACTGTGCGAGAGATACGGTGGTCTACGG |
| | | | TATGGACGTCTGGGGCCAAGGGACCACGGTCACCGTCTCCTCA |
| 2 | IMPI-052 | VH domain | EVQLVESGGGLIQPGGSLRLSCAASGVTVSSNYMNWVRQAPGKGLEGVSVIYSGGTTYYADSVKGRFTISRDNSKNT |
| | | amino acid | LYLQMNSLRAEDTAVYYCARDTVVYGMDVWGQGTTVTVSS |
| | | sequence | |
| 3 | IMPI-052 | HCDR1 | GVTVSSNY |
| 4 | IMPI-052 | HCDR2 | IYSGGTT |
| 5 | IMPI-052 | HCDR3 | ARDTVVYGMDV |
| 6 | IMPI-052 | VL domain | GACATCCAGTTGACCCAGTCTCCATCCTTCCTGTCTGCATCTGTAGGAGACAGAGTCACCATCACTTGCTGGGCCAG |
| | | nucleic | TCAGGGCATTAGCAGTTATTTAGCCTGGTATCAGCAAAAACCAGGGAAAGCCCCTAAGCTCCTGATCTATACTGCAT |
| | | acid | CCACTTTGCAAAGTGGGGTCCCATCAAGGTTCAGCGGCAGTGGATCTGGGACAGAATTCACTCTCACAATCAGCAGC |
| | | sequence | CTGCAGCCTGAAGATTTTGCAACTTATTACTGTCAACAGCTTAATAGTTACCCGCTCACTTTCGGCGGAGGGACCAA |
| | | | GGTGGAGATCAAA |
| 7 | IMPI-052 | VL domain | DIQLTQSPSFLSASVGDRVTITCWASQGISSYLAWYQQKPGKAPKLLIYTASTLQSGVPSRFSGSGSGTEFTLTISS |
| | | amino acid | LQPEDFATYYCQQLNSYPLTFGGGTKVEIK |
| | | sequence | |
| 8 | IMPI-052 | LCDR1 | QGISSY |
| 9 | IMPI-052 | LCDR2 | TAS |
| 10 | IMPI-052 | LCDR3 | QQLNSYPLT |
| 11 | IMPI-047 | VH domain | GAGGTGCAGCTGGTGGAGTCTGGAGGAGGCTTGATCCAGCCTGGGGGGTCCCTGAGACTCTCCTGTGCAGCCTCTGG |
| | | nucleic | GTTCACCGTCAGTAGCAACTACATGAACTGGGTCCGCCAGGCTCCAGGGAAGGGGCTGGAGTGGGTCTCAGTTATTT |
| | | acid | ATAGCGGTGGTAGCACATACTACGCAGACTCCGTGAAGGGCCGATTCACCATCTCCAGAGACAATTCCAAGAACACG |
| | | sequence | CTGTATCTTCAAATGAACAGCCTGAGAACCGAGGACACGGCCGTGTATTACTGTGCGCGAGATCTAGTGGCTTACGG |
| | | | TATGGACGTCTGGGGCCAAGGGACCACGGTCACCGTCTCCTCA |
| 12 | IMPI-047 | VH domain | EVQLVESGGGLIQPGGSLRLSCAASGFTVSSNYMNWVRQAPGKGLEWVSVIYSGGSTYYADSVKGRFTISRDNSKNT |
| | | amino acid | LYLQMNSLRTEDTAVYYCARDLVAYGMDVWGQGTTVTVSS |
| | | sequence | |
| 13 | IMPI-047 | HCDR1 | GFTVSSNY |
| 14 | IMPI-047 | HCDR2 | IYSGGST |
| 15 | IMPI-047 | HCDR3 | ARDLVAYGMDV |
| 16 | IMPI-047 | VL domain | GACATCCAGTTGACCCAGTCTCCATCCTTCCTGTCTGCATCTGTAGGAGACAGAGTCACCATCACTTGCTGGGCCAG |
| | | nucleic | TCAGGGCATTAGCAGTTATTTAGCCTGGTATCAGCAAAAACCAGGGAAAGCCCCTAAGGTCCTGATCTATGCTGCAT |
| | | acid | CCACTTTGCAAAGTGGGGTCCCATCAAGGTTCAGCGGCAGTGGATCTGGGACAGAATTCACTCTCACAATCAGCAGC |
| | | sequence | CTGCAGCCTGAAGATTTTGCAACTTATTACTGTCAACTACTTAATAGTAACCCGCTCACTTTCGGCGGAGGGACCAA |
| | | | GGTGGAGATCAAA |
| 17 | IMPI-047 | VL domain | DIQLTQSPSFLSASVGDRVTITCWASQGISSYLAWYQQKPGKAPKVLIYAASTLQSGVPSRFSGSGSGTEFTLTISS |
| | | amino acid | LQPEDFATYYCQLLNSNPLTFGGGTKVEIK |
| | | sequence | |
| 8 | IMPI-047 | LCDR1 | QGISSY |
| 18 | IMPI-047 | LCDR2 | AAS |
| 19 | IMPI-047 | LCDR3 | QLLNSNPLT |
| 20 | IMPI-003 | VH domain | GAAGTGCAGCTGGTGGAGTCTGGGGGAGGCTTGGTACAGCCTGGCAGGTCCCTGAGACTCTCCTGTGCAGCCTCTGG |
| | | nucleic | ATTCACCTTTGATGATTATGCCATGCACTGGGTCCGGCAAGCTCCAGGGAAGGGCCTGGAGTGGGTCTCAGGTATTA |
| | | acid | GTTGGAATAGTGGTAGCATAGGCTATGCGGACTCTGTGAAGGGCCGATTCACCATCTCCAGAGACAACGCCAAGAAC |
| | | sequence | TCCCTGTATCTGCAAATGAACAGTCTGAGAGCTGAAGACACGGCCTTATATTACTGTGCAAAAGATTTGGGACTGGG |
| | | | GATTGGCTTCTATTACGGTTTGGACGTCTGGGGCCAGGGGACCACGGTCACCGTCTCCTCA |
| 21 | IMPI-003 | VH domain | EVQLVESGGGLVQPGRSLRLSCAASGFTFDDYAMHWVRQAPGKGLEWVSGISWNSGSIGYADSVKGRFTISRDNAKN |
| | | amino acid | SLYLQMNSLRAEDTALYYCAKDLGLGIGFYYGLDVWGQGTTVTVSS |
| | | sequence | |
| 22 | IMPI-003 | HCDR1 | GFTFDDYA |
| 23 | IMPI-003 | HCDR2 | ISWNSGSI |
| 24 | IMPI-003 | HCDR3 | AKDLGLGIGFYYGLDV |
| 25 | IMPI-003 | VL domain | GCCATCCAAATGACCCAGTCTCCATCCTCCCTGTCTGCATCTGTAGGAGACAGAGTCACCATCACTTGCCGGGCAAG |
| | | nucleic | TCAGGGCATTAGAAATGATTTAGGCTGGTATCAGCAGAAGCCAGGGAAAGCCCCTAAGCTCCTGATCTATGATGCAT |
| | | acid | CCACTTTACAAAGTGGGGTCCCATCGAGGTTCAGCGGCAGTGGATCTGGCACAGATTTCACTCTCACCCTCAGCAGC |
| | | sequence | CTGGAGCCTGAAGATTTAGCAACTTATTACTGTCTACATCACTACACTTACCCGTGGACGTTCGGCCATGGGACCAA |
| | | | GGTGGAACTCAAA |
| 26 | IMPI-003 | VL domain | AIQMTQSPSSLSASVGDRVTITCRASQGIRNDLGWYQQKPGKAPKLLIYDASTLQSGVPSRFSGSGSGTDFTLTLSS |
| | | amino acid | LEPEDLATYYCLHHYTYPWTFGHGTKVELK |
| | | sequence | |
| 27 | IMPI-003 | LCDR1 | QGIRND |
| 28 | IMPI-003 | LCDR2 | DAS |
| 29 | IMPI-003 | LCDR3 | LHHYTYPWT |
| 30 | IMPI-043 | VH domain | GAGGTGCAGCTGGTGCAGTCTGGAGCAGAGGTGAAAAAGCCCGGGGAGTCTCTGAAGATCTCCTGTAAGGGTTCTGG |
| | | nucleic | ATACAGCTTTACCAGCTACTGGATCGGCTGGGTGCGCCAGATGCCCGGGAAAGGCCTGGAGTGGATGGGGATCATCT |
| | | acid | ATCCTGGTGACTCTGATACCAGGAACAGCCCGTCCTTCCAAGGCCAGGTCACCATCTCAGCCGACAAGTCCATCAGC |
| | | sequence | ACCGCCTACCTGCAGTGGAGCAGCCTGAAGGCCTCGGACACCGCCATGTATTACTGTGCGAGGTCGTATAACTGGAA |
| | | | CTACTTTGACTACTGGGGCCAGGGAACCCTGGTCACCGTCTCCTCA |
| 31 | IMPI-043 | VH domain | EVQLVQSGAEVKKPGESLKISCKGSGYSFTSYWIGWVRQMPGKGLEWMGIIYPGDSDTRNSPSFQGQVTISADKSIS |
| | | amino acid | TAYLQWSSLKASDTAMYYCARSYNWNYFDYWGQGTLVTVSS |
| | | sequence | |
| 32 | IMPI-043 | HCDR1 | GYSFTSYW |
| 33 | IMPI-043 | HCDR2 | IYPGDSDT |
| 34 | IMPI-043 | HCDR3 | ARSYNWNYFDY |
| 35 | IMPI-043 | VL domain | GCCATCCAGTTGACCCAGTCTCCATCCTCCCTGTCTGCATCTGTAGGAGACAGAGTCACCATCACTTGCCGGGCAAG |
| | | nucleic | TCAGGGCATTAGCAGTGCTTTAGCCTGGTATCAGCAGAAACCAGGGAAAGCTCCTAAGCTCCTGATCTATGATGCCT |
| | | acid | CCAGTTTGGAAAGTGGGGTCCCATCAAGGTTCAGCGGCAGTGGATCTGGGACAGATTTCACTCTCACCATCAGCAGC |
| | | sequence | CTGCAGCCTGAAGATTTTGCAGCTTATTACTGTCAACAGTTTATTAGTTATCCTTGGACGTTCGGCCAAGGGACCAA |
| | | | GGTGGAAATCAAA |
| 36 | IMPI-043 | VL domain | AIQLTQSPSSLSASVGDRVTITCRASQGISSALAWYQQKPGKAPKLLIYDASSLESGVPSRFSGSGSGTDFTLTISS |
| | | amino acid | LQPEDFAAYYCQQFISYPWTFGQGTKVEIK |
| | | sequence | |
| 37 | IMPI-043 | LCDR1 | QGISSA |
| 28 | IMPI-043 | LCDR2 | DAS |
| 38 | IMPI-043 | LCDR3 | QQFISYPWT |
| 39 | IMPI-048 | VH domain | CAGGTGCAGCTGCAGGAGTCGGGCCCAGGACTGGTGAAGCCTTCACAGACCCTGTCCCTCACCTGCACTGTCTCTGG |
| | | nucleic | TGGCTCCATCAGCAGTTATGGTTACTACTGGAGCTGGATCCGCCAGCACCCAGGGAAGGGCCTGGAGTGGATTGGGT |
| | | acid | ACATCTATTACAGTGGGAGCACCTACTACAACCCGTCCCTCAAGAGTCGAGCTACCATATCAGTAGACACGTCTAAG |
| | | sequence | AACCAGCTCTCCCTGAGGCTGAACTCTGTCAGTGCCGCGGACACGGCCGTGTATTACTGTGCGAGAGACTTCGGTGG |
| | | | TAACTCGAACTACTTTGACTACTGGGGCCAGGGAAGCCTGGTCACCGTCTCCTCA |
| 40 | IMPI-048 | VH domain | QVQLQESGPGLVKPSQTLSLTCTVSGGSISSYGYYWSWIRQHPGKGLEWIGYIYYSGSTYYNPSLKSRATISVDTSK |
| | | amino acid | NQLSLRLNSVSAADTAVYYCARDFGGNSNYFDYWGQGSLVTVSS |
| | | sequence | |
| 41 | IMPI-048 | HCDR1 | GGSISSYGYY |
| 42 | IMPI-048 | HCDR2 | IYYSGST |
| 43 | IMPI-048 | HCDR3 | ARDFGGNSNYFDY |
| 44 | IMPI-048 | VL domain | GCCATCCAGTTGACCCAGTCTCCATCCTCCCTGTCTGCATCTGTAGGAGACAGAGTCTCCATCACTTGCCGGGCAAG |
| | | nucleic | TCAGGTCATTAGTAGTGCTTTAGCCTGGTATCAGCAGAAACCAGGGAAAGCTCCTAAGCTCCTGATCTATGATGCCT |
| | | acid | CCAGTTTGGAAAGTGGGGTCCCATCAAGGTTCAGCGGCAGTGGATCTGGGACAGATTTCACTCTCACCATCAGCAGC |
| | | sequence | CTGCAGCCTGAAGATTTTACAACTTATTACTGTCAACAGTTTAATAGTTACCCTCTCACTTTCGGCGGAGGGACCAC |
| | | | GGTGGAGATCAAA |
| 45 | IMPI-048 | VL domain | AIQLTQSPSSLSASVGDRVSITCRASQVISSALAWYQQKPGKAPKLLIYDASSLESGVPSRFSGSGSGTDFTLTISS |
| | | amino acid | LQPEDFTTYYCQQFNSYPLTFGGGTTVEIK |
| | | sequence | |
| 46 | IMPI-048 | LCDR1 | QVISSA |
| 28 | IMPI-048 | LCDR2 | DAS |
| 47 | IMPI-048 | LCDR3 | QQFNSYPLT |
| 48 | IMPI-014 | VH domain | CAGGTGCAGCTGCAGGAGTCGGGCCCAGGACTGGTGAAGCCTTCACAGACCCTGTCCCTCACCTGCACTGTCTCTGG |
| | | nucleic | TGGCTCCATCAGCAGTTATGGTTACTACTGGAGCTGGATCCGCCAGCACCCAGGGAAGGGCCTGGAGTGGATTGGGT |
| | | acid | ACATCTATTACAGTGGGAGCACCTACTACAACCCGTCCCTCAAGAGTCGAGCTACCATATCAGTAGACACGTCTAAG |
| | | sequence | AACCAGCTCTCCCTGAGGCTGAACTCTGTCAGTGCCGCGGACACGGCCGTGTATTACTGTGCGAGAGACTTCGGTGG |
| | | | TAACTCGAACTACTTTGACTACTGGGGCCAGGGAACCCTGGTCACCGTCTCCTCA |
| 49 | IMPI-014 | VH domain | QVQLQESGPGLVKPSQTLSLTCTVSGGSISSYGYYWSWIRQHPGKGLEWIGYIYYSGSTYYNPSLKSRATISVDTSK |
| | | amino acid | NQLSLRLNSVSAADTAVYYCARDFGGNSNYFDYWGQGTLVTVSS |
| | | sequence | |
| 41 | IMPI-014 | HCDR1 | GGSISSYGYY |
| 42 | IMPI-014 | HCDR2 | IYYSGST |
| 43 | IMPI-014 | HCDR3 | ARDFGGNSNYFDY |
| 50 | IMPI-014 | VL domain | GCCATCCAGTTGACCCAGTCTCCATCCTCCCTGTCTGCATCTGTAGGAGACAGGGTCACCATCACTTGCCGGGCAAG |
| | | nucleic | TCAGGGCATTAGCAGTGCTTTAGCCTGGTATCAGCAGAAACCAGGTAAAGCTCCTAAGCTCCTGATCTATGATGCCT |
| | | acid | CCAGTTTGGAAAGTGGGGTCCCATCAAGGTTCAGCGGCAGTGGATCTGGGACAGATTTCACTCTCACCATCAGCAGC |
| | | sequence | CTGCAGCCTGAAGATTTTACAACTTATTACTGTCAACAGTTTAATAGTTACCCTCTCACTTTCGGCGGAGGGACCAA |
| | | | GGTGGAGATCAAA |
| 51 | IMPI-014 | VL domain | AIQLTQSPSSLSASVGDRVTITCRASQGISSALAWYQQKPGKAPKLLIYDASSLESGVPSRFSGSGSGTDFTLTISS |
| | | amino acid | LQPEDFTTYYCQQFNSYPLTFGGGTKVEIK |
| | | sequence | |
| 37 | IMPI-014 | LCDR1 | QGISSA |
| 28 | IMPI-014 | LCDR2 | DAS |
| 47 | IMPI-014 | LCDR3 | QQFNSYPLT |
| 52 | IMPI-059 | VH domain | GAGGTGCAGCTGGTGGAGTCTGGAGGAGGCTTGATCCAGCCGGGGGGGTCCCTGAGACTCTCCTGTGCAGCCTCTGG |
| | | nucleic | GTTCACCGTCAGTAGCATCTACATGAGCTGGGTCCGCCAGGCTCCAGGGAAGGGGCTGGAGTGGGTCTCAATTATTT |
| | | acid | ATAGCCGTGGTAGTACAGACTACGCAGACTCCGTGAAGGGCCGATTCACCATCTCCAGAGACATTTCCAAGAACACG |
| | | sequence | CTGTATCTTCAAATGAACAGCCTGAGAGCCGAGGACACGGCCGTGTATTACTGTGCGAGAGATGGGACTATGGTTCG |
| | | | GGGAGTTCATGCTTTTGATATCTGGGGCCAAGGGACAATGGTCACCGTCTCTTCA |
| 53 | IMPI-059 | VH domain | EVQLVESGGGLIQPGGSLRLSCAASGFTVSSIYMSWVRQAPGKGLEWVSIIYSRGSTDYADSVKGRFTISRDISKNT |
| | | amino acid | LYLQMNSLRAEDTAVYYCARDGTMVRGVHAFDIWGQGTMVTVSS |
| | | sequence | |
| 54 | IMPI-059 | HCDR1 | GFTVSSIY |
| 55 | IMPI-059 | HCDR2 | IYSRGST |
| 56 | IMPI-059 | HCDR3 | ARDGTMVRGVHAFDI |
| 57 | IMPI-059 | VL domain | GACATCCAGATGACCCAGTCTCCACCCTCCCTGTCTGCATCTATAGGAGACAGAGTCACCATCACTTGCCAGGCGAG |
| | | nucleic | TCAGGACATTAGCAACTATTTAAATTGGTATCAGCAGAAACCAGGGAAAGCCCCTAAGCTCCTGATCTACGATGCAT |
| | | acid | CCAATTTGGAAACAGGGGTCCCATCAAGGTTCAGTGGAAGTGGATCTGGGACAGATTTTACTCTCACCATCAGCAAC |
| | | sequence | CTGCAGCCTGAAGATATTGTAACATATTACTGTCAACAGTATGATAATCTCCCGAGCAGTTTTGGCCAGGGGACCAA |
| | | | GCTGGAGATCAAA |
| 58 | IMPI-059 | VL domain | DIQMTQSPPSLSASIGDRVTITCQASQDISNYLNWYQQKPGKAPKLLIYDASNLETGVPSRFSGSGSGTDFTLTISN |
| | | amino acid | LQPEDIVTYYCQQYDNLPSSFGQGTKLEIK |
| | | sequence | |
| 59 | IMPI-059 | LCDR1 | QDISNY |
| 28 | IMPI-059 | LCDR2 | DAS |
| 60 | IMPI-059 | LCDR3 | QQYDNLPSS |
| 61 | IMPI-057 | VH domain | GAAGTGCAGCTGGTGGAGTCTGGGGGAGGCTTGGTACAGCCTGGCAGGTCCCTGAGACTCTCCTGTGCAGCCTCTGG |
| | | nucleic | ATTCACCTTTGATGATTATGCCATACACTGGGTCCGGCAAGCTCCAGGGAAGGGCCTGGAATGGGTCTCAGGTATTA |
| | | acid | CTTGGAATAGTGGTAGCATAGGCTATGCGGACTCTGTGAAGGGCCGATTCACCATCTCCAGAGACAACGCCAAGAAC |
| | | sequence | TCCCTGTATCTGCAAATGAACAGTCTGAGAGCTGAGGATACGGCCTTGTATTACTGTGCAAAAGATCTCCAGGGGGA |
| | | | CTACTACTACTACGGTATGGACGTCTGGGGCCAAGGGACCACGGTCACCGTCTCCTCA |
| 62 | IMPI-057 | VH domain | EVQLVESGGGLVQPGRSLRLSCAASGFTFDDYAIHWVRQAPGKGLEWVSGITWNSGSIGYADSVKGRFTISRDNAKN |
| | | amino acid | SLYLQMNSLRAEDTALYYCAKDLQGDYYYYGMDVWGQGTTVTVSS |
| | | sequence | |
| 22 | IMPI-057 | HCDR1 | GFTFDDYA |
| 63 | IMPI-057 | HCDR2 | ITWNSGSI |
| 64 | IMPI-057 | HCDR3 | AKDLQGDYYYYGMDV |
| 65 | IMPI-057 | VL domain | GCCATCCAGTTGACCCAGTCTCCATCCTCCCTGTCTGCATCTGTAGGAGACAGAGTCACCATCACTTGCCGGGCTAG |
| | | nucleic | TCAGGACATTAGCAGTGCTTTAGCCTGGTATCAGCAGAAAGCAGGGAAAGCTCCTAAGCTCCTGATCTATGATGGCT |
| | | acid | CCAGTTTTAAAAGTGGGGTCCCATCAAGGTTCAGCGGCAGTAGATCTGGGACAGATTTCACTCTCACCATCAGCAGC |
| | | sequence | CTGCAGCCTGAAGATTTTGCAACTTATTACTGTCAACAGTTTATTAGTTACCCGCTCACTTTCGGCGGAGGGACCAG |
| | | | GGTGGAGATCAAA |
| 66 | IMPI-057 | VL domain | AIQLTQSPSSLSASVGDRVTITCRASQDISSALAWYQQKAGKAPKLLIYDGSSFKSGVPSRFSGSRSGTDFTLTISS |
| | | amino acid | LQPEDFATYYCQQFISYPLTFGGGTRVEIK |
| | | sequence | |
| 67 | IMPI-057 | LCDR1 | QDISSA |
| 68 | IMPI-057 | LCDR2 | DGS |
| 69 | IMPI-057 | LCDR3 | QQFISYPLT |
| 70 | IMPI-015 | VH domain | GAGGTGCAGCTGGTGCAGTCTGGAGCAGAGGTGAAAAAGCCCGGGGAGTCTCTGAAGATCTCCTGTAAGGGTTCTGG |
| | | nucleic | ATACAGCTTTACCATCTACTGGATCGGCTGGGTGCGCCAGATGCCCGGGAAAGGCCTGGAGTGGATGGGGATCATCT |
| | | acid | ATCCTGGTGACTCTGATACCAGATACAGCCCGTCCTTCCAAGGCCAGGTCACCATCTCAGCCGACAAGTCCATCAGC |
| | | sequence | ACCGCCTACCTGCAGTGGAGCAGCCTGAAGGCCTCGGACACCGCCATGTATTACTGTGCGAGGTCGTATAACTGGAA |
| | | | CTACTTTGACTACTGGGGCCAGGGAACCCTGGTCACCGTCTCCTCA |
| 71 | IMPI-015 | VH domain | EVQLVQSGAEVKKPGESLKISCKGSGYSFTIYWIGWVRQMPGKGLEWMGIIYPGDSDTRYSPSFQGQVTISADKSIS |
| | | amino acid | TAYLQWSSLKASDTAMYYCARSYNWNYFDYWGQGTLVTVSS |
| | | sequence | |
| 72 | IMPI-015 | HCDR1 | GYSFTIYW |
| 33 | IMPI-015 | HCDR2 | IYPGDSDT |
| 34 | IMPI-015 | HCDR3 | ARSYNWNYFDY |
| 73 | IMPI-015 | VL domain | GCCATCCAGTTGACCCAGTCTCCATCCTCCCTGTCTGCATCTGTAGGAGACAGAGTCACCATCACTTGCCGGGCAAG |
| | | nucleic | TCAGGGCATTAACAGTGCTTTAGCCTGGTATCAGCAGAAACCAGGGAAAACTCCTAAACTCCTAATCTATGATGCCT |
| | | acid | CCAGTTTGGAAAGTGGGGTCCCATCAAGGTTCAGCGGCAGTGGATCTGGGACAGATTTCACTCTCACCATCAGCAGC |
| | | sequence | CTGCAGCCTGAAGATTTTGCAACTTATTACTGTCAACAGTTTAATAGTTACCCTTGGACGTTCGGCCAAGGGACCAA |
| | | | GGTGGAAATCAAA |
| 74 | IMPI-015 | VL domain | AIQLTQSPSSLSASVGDRVTITCRASQGINSALAWYQQKPGKTPKLLIYDASSLESGVPSRFSGSGSGTDFTLTISS |
| | | amino acid | LQPEDFATYYCQQFNSYPWTFGQGTKVEIK |
| | | sequence | |
| 75 | IMPI-015 | LCDR1 | QGINSA |
| 28 | IMPI-015 | LCDR2 | DAS |
| 76 | IMPI-015 | LCDR3 | QQFNSYPWT |
| 77 | IMPI-025 | VH domain | CAGGTGCAGCTGCAGGAGTCGGGCCCAGGACTGGTGAAGCCTTCGGGGACCCTGTCCCTCACCTGCGCTGTCTCTGG |
| | | nucleic | TGGCTCCATCAGCAGGAGTACCTGGTGGAGTTGGGTCCGCCAGCCCCCAGGGAAGGGGCTGGAGTGGATTGGGGAAA |
| | | acid | TCTCTCATAGTGGGAGCACCCAGTACAACCCGTCCCTCAAGAGTCGAGTCACCATATCACTAGACAAGTCCAAGAAC |
| | | sequence | CAGTTCTCCCTGAAGCTGAACTCTGTGACCGCCGCGGACACGGCCGTATATTACTGTGCGGGAGAGGGGTATAACTG |
| | | | GAACTACTGGGGCCAGGGAACCCTGGTCACCGTCTCCTCA |
| 78 | IMPI-025 | VH domain | QVQLQESGPGLVKPSGTLSLTCAVSGGSISRSTWWSWVRQPPGKGLEWIGEISHSGSTQYNPSLKSRVTISLDKSKN |
| | | amino acid | QFSLKLNSVTAADTAVYYCAGEGYNWNYWGQGTLVTVSS |
| | | sequence | |
| 79 | IMPI-025 | HCDR1 | GGSISRSTW |
| 80 | IMPI-025 | HCDR2 | ISHSGST |
| 81 | IMPI-025 | HCDR3 | AGEGYNWNY |
| 82 | IMPI-025 | VL domain | GATGTTGTAATGACTCAGTCTCCACTCTCCCTGCCCGTCACCCTTGGACAGCCGGCCTCCATCTCCTGCAGGTCTAG |
| | | nucleic | TCAAAGCCTCGTATACAGTGATGGAAACACCTACTTGAGTTGGTTTCAGCAGAGGCCAGGCCAATCTCCAAGGCGCC |
| | | acid | TAATTTATAAGGTTTCTAAGTGGGACTCTGGGGTCCCAGACAGATTCAGCGGCAGTGGGTCAGGCACTGATTTCACA |
| | | sequence | CTGAAAATCAGCAGGGTGGAGGCTGAGGATGTTGGGATTTATTACTGCATGCAAGGTACACACTGGCCGCTCACTTT |
| | | | CGGCGGAGGGACCAAGGTGGAGATCAAA |
| 83 | IMPI-025 | VL domain | DVVMTQSPLSLPVTLGQPASISCRSSQSLVYSDGNTYLSWFQQRPGQSPRRLIYKVSKWDSGVPDRFSGSGSGTDFT |
| | | amino acid | LKISRVEAEDVGIYYCMQGTHWPLTFGGGTKVEIK |
| | | sequence | |
| 84 | IMPI-025 | LCDR1 | QSLVYSDGNTY |
| 85 | IMPI-025 | LCDR2 | KVS |
| 86 | IMPI-025 | LCDR3 | MQGTHWPLT |
| 87 | IMPI-051 | VH domain | GAGGTGCAGCTGGTGCAGTCTGGAGCAGAGGTGAAAAAGCCCGGGGAGTCTCTGAAGATCTCCTGTAAGGGTTCTGA |
| | | nucleic | ATACAGATTTACCAGCTACTGGATCGGCTGGGTGCGCCAGATGCCCGGGAAAGGCCTGGAGTGGATGGGGATCATCT |
| | | acid | ATCCTGGTGACTCTGATACCAGATACAGCCCGTCCTTCCAAGGCCAGGTCACCATCTCAGCCGACAAGTCCATCAGC |
| | | sequence | ACCGCCTACCTGCAGTGGAGCAGCCTGAAGGCCTCGGACACCGCCATGTATTACTGTGCGAGGTCGTATAACTGGAA |
| | | | CTACTTTGACTACTGGGGCCAGGGAACCCTGGTCACCGTCTCCTCA |
| 88 | IMPI-051 | VH domain | EVQLVQSGAEVKKPGESLKISCKGSEYRFTSYWIGWVRQMPGKGLEWMGIIYPGDSDTRYSPSFQGQVTISADKSIS |
| | | amino acid | TAYLQWSSLKASDTAMYYCARSYNWNYFDYWGQGTLVTVSS |
| | | sequence | |
| 89 | IMPI-051 | HCDR1 | EYRFTSYW |
| 33 | IMPI-051 | HCDR2 | IYPGDSDT |
| 34 | IMPI-051 | HCDR3 | ARSYNWNYFDY |
| 90 | IMPI-051 | VL domain | GCCATCCAGTTGACCCAGTCTCCTTCCTCCCTGTCTGCATCTGTAGGAGACAGAGTCACCATCACTTGCCGGCCAAG |
| | | nucleic | TCAGGGCATTAGCAGTGGTTTAGCCTGGTATCAGCAGAAACCAGGGAAAGCTCCTAACCTCCTGATCTATGATGCCT |
| | | acid | CCAGTTTGGAAAGTGGGGTCCCATCAAGGTTCAGCGGCAGTGGATCTGGGACAGATTTCACTCTCACCATCAGCAGC |
| | | sequence | CTGCAGCCTGAGGATTTTGCAACTTATTACTGTCAACAGTTTAAAAGTTACCCTTGGACGTTCGGCCAAGGGACCAA |
| | | | GGTGGAAATCAAA |
| 91 | IMPI-051 | VL domain | AIQLTQSPSSLSASVGDRVTITCRPSQGISSGLAWYQQKPGKAPNLLIYDASSLESGVPSRFSGSGSGTDFTLTISS |
| | | amino acid | LQPEDFATYYCQQFKSYPWTFGQGTKVEIK |
| | | sequence | |
| 92 | IMPI-051 | LCDR1 | QGISSG |
| 28 | IMPI-051 | LCDR2 | DAS |
| 93 | IMPI-051 | LCDR3 | QQFKSYPWT |
| 94 | IMPI-031 | VH domain | GAAGTGCAGCTGGTGGAGTCTGGGGGAGGCTTGGTACAGCCTGGCAGGTCCCTGAGACTCTCCTGTGCAGCCTCTGG |
| | | nucleic | ATTCACCTTTGATGATTATGCCATGCACTGGGTCCGGCAATCTCCAGGGAAGGGCCTGGAGTGGGTCTCAGGTATTA |
| | | acid | GTTGGAATAGTGGTTCCATAGGCTATGCGGACTCTGTGAAGGGCCGATTCACCATCTCCAGAGACAACGCCAAGAAC |
| | | sequence | TCCCTGTATCTGCAAATGAACAGTCTGAGAGCTGAGGACACGGCCTTGTATTACTGTGCAAAAGATCTCCAGGGGGA |
| | | | CGACTACTACTACGGTATGGACGTCTGGGGCCAAGGGACCACGGTCACCGTCTCCTCA |
| 95 | IMPI-031 | VH domain | EVQLVESGGGLVQPGRSLRLSCAASGFTFDDYAMHWVRQSPGKGLEWVSGISWNSGSIGYADSVKGRFTISRDNAKN |
| | | amino acid | SLYLQMNSLRAEDTALYYCAKDLQGDDYYYGMDVWGQGTTVTVSS |
| | | sequence | |
| 22 | IMPI-031 | HCDR1 | GFTFDDYA |
| 23 | IMPI-031 | HCDR2 | ISWNSGSI |
| 96 | IMPI-031 | HCDR3 | AKDLQGDDYYYGMDV |
| 97 | IMPI-031 | VL domain | GCCATCCAGTTGACCCAGTCTCCATCCTCCCTGTCTGCATCTGTAGGAGACAGAGTCACCATCACTTGCCGGGCAAG |
| | | nucleic | TCAGGGCATTAGCAGTGCTTTAGCCTGGTATCAGCAGAAACCAGGGAAAGCTCCTAAGCTCCTGATCTTTGATGCCT |
| | | acid | CCAGTTTGGAAAGTGGGGTCCCATCAAGGTTCAGCGGCAGTGGATCTGGGACAGATTTCACTTTCACCATCAGCAGC |
| | | sequence | CTGCAGCCTGAAGATTTTGCAGCTTTTTACTGTCAACAGTTTATTAGTTACCCGCTCACTTTCGGCGGAGGGACCAA |
| | | | GGTGGAGATCAAA |
| 98 | IMPI-031 | VL domain | AIQLTQSPSSLSASVGDRVTITCRASQGISSALAWYQQKPGKAPKLLIFDASSLESGVPSRFSGSGSGTDFTFTISS |
| | | amino acid | LQPEDFAAFYCQQFISYPLTFGGGTKVEIK |
| | | sequence | |
| 37 | IMPI-031 | LCDR1 | QGISSA |
| 28 | IMPI-031 | LCDR2 | DAS |
| 69 | IMPI-031 | LCDR3 | QQFISYPLT |
| 99 | IMPI-045 | VH domain | CAGGTGCAGCTGCAGGAGTCGGGCCCAGGACTGGTGAAGCCTTCACAGACCCTGTCCCTCACCTGCACTGTCTCTGG |
| | | nucleic | TGGCTCCATCAGCAGTTATGGTTTCTACTGGAGCTGGATCCGCCAGCACCCAGGGAAGGGCCTGGAGTGGATTGGGT |
| | | acid | TCATCTATTACAGTGGGAGCACCTACTACAACCCGTCCCTCAAGAGTCGAGCTACCATATCAGTAGACACGTCTAAG |
| | | sequence | AACCAGCTCTCCCTGAGGCTGAACTCTGTCAGTGCCGCGGACACGGCCGTGTATTACTGTGCGAGAGACTTCGGTGG |
| | | | TAACTCGAACTACTTTGACTACTGGGGCCAGGGAACCCTGGTCACCGTCTCCTCA |
| 100 | IMPI-045 | VH domain | QVQLQESGPGLVKPSQTLSLTCTVSGGSISSYGFYWSWIRQHPGKGLEWIGFIYYSGSTYYNPSLKSRATISVDTSK |
| | | amino acid | NQLSLRLNSVSAADTAVYYCARDFGGNSNYFDYWGQGTLVTVSS |
| | | sequence | |
| 101 | IMPI-045 | HCDR1 | GGSISSYGFY |
| 42 | IMPI-045 | HCDR2 | IYYSGST |
| 43 | IMPI-045 | HCDR3 | ARDFGGNSNYFDY |
| 102 | IMPI-045 | VL domain | GCCATCCAATTGACCCAGTCTCCATCCTCCCTGTCTGCGTCTGTTGGAGACAGAGTCACCATCACTTGCCGGGCAAG |
| | | nucleic | TCAGGGCATTAGCAGTGCTTTAGCCTGGTATCAGCAGAAACCAGGGAAAGCTCCTCAGCTCCTGATCTATGATGCCT |
| | | acid | CCAGTTTGGAAAGTGGGGTCCCATCGAGGTTCAGCGGCAGTGGATCTGGGACAGATTTCACTCTCACCATCAGCAGC |
| | | sequence | CTGCAGCCTGAAGATTTTGCAACTTATTACTGTCAACAGTTTAATAGTTACCCTCTCACTTTCGGCGGAGGGACCAA |
| | | | GGTGGAGATCAAA |
| 103 | IMPI-045 | VL domain | AIQLTQSPSSLSASVGDRVTITCRASQGISSALAWYQQKPGKAPQLLIYDASSLESGVPSRFSGSGSGTDFTLTISS |
| | | amino acid | LQPEDFATYYCQQFNSYPLTFGGGTKVEIK |
| | | sequence | |
| 37 | IMPI-045 | LCDR1 | QGISSA |
| 28 | IMPI-045 | LCDR2 | DAS |
| 47 | IMPI-045 | LCDR3 | QQFNSYPLT |
| 104 | IMPI-005 | VH domain | GAGGTGCAGCTGGTGGAGTCTGGAGGAGGCTTGATCCAGCCTGGGGGGTCCCTGAGACTCTCCTGTGCAGCCTCTGG |
| | | nucleic | GTTCACCGTCAGTAGCAACTATATGAACTGGGTCCGCCAGGCTCCAGGGAAGGGGCTGGAGTGGGTCTCAGTTATTT |
| | | acid | ATAGCGGTGGTAGCACATACTACGCAGACTCCGTGAAGGGCCGATTCACCATCTCCAGAGACAATTCCAAGAACACG |
| | | sequence | CTGTTTCTTCAAATGAACAGCCTGAGAGCCGAGGACTCGGCCGTGTATTACTGTGCGAGAGATTTGGGACCCTACGG |
| | | | TGTGGACGTCTGGGGCCAAGGGACCACGGTCACCGTCTCCTCA |
| 105 | IMPI-005 | VH domain | EVQLVESGGGLIQPGGSLRLSCAASGFTVSSNYMNWVRQAPGKGLEWVSVIYSGGSTYYADSVKGRFTISRDNSKNT |
| | | amino acid | LFLQMNSLRAEDSAVYYCARDLGPYGVDVWGQGTTVTVSS |
| | | sequence | |
| 13 | IMPI-005 | HCDR1 | GFTVSSNY |
| 14 | IMPI-005 | HCDR2 | IYSGGST |
| 106 | IMPI-005 | HCDR3 | ARDLGPYGVDV |
| 107 | IMPI-005 | VL domain | GACATCCAGTTGACCCAGTCTCCATCCTTCCTGTCTGCATCTGTAGGAGACAGAGTCACCATCACTTGCTGGGCCAG |
| | | nucleic | TCAGGGCATTAGCAGTTATTTAGCCTGGTATCAGCAAAAACCAGGGAAAGCCCCTAAGCTCCTGATCTATGCTGCAT |
| | | acid | CCACTTTGCAAAGTGGGGTCCCATCAAGGTTCAGCGGCAGTGGATCTGGGACAGAATTCACTCTCACAATCAGCAGC |
| | | sequence | CTGCAGCCTGAAGATTTTGCAACTTATTACTGTCAAGAGCTTAATAGTTACCCTCTCACCTTCGGCCAAGGGACACG |
| | | | ACTGGAGATTAAA |
| 108 | IMPI-005 | VL domain | DIQLTQSPSFLSASVGDRVTITCWASQGISSYLAWYQQKPGKAPKLLIYAASTLQSGVPSRFSGSGSGTEFTLTISS |
| | | amino acid | LQPEDFATYYCQELNSYPLTFGQGTRLEIK |
| | | sequence | |
| 8 | IMPI-005 | LCDR1 | QGISSY |
| 18 | IMPI-005 | LCDR2 | AAS |
| 109 | IMPI-005 | LCDR3 | QELNSYPLT |
| 110 | IMPI-038 | VH domain | CAGGTGCAGCTGGTGGAGTCTGGGGGAGGCGTGGTCCAGCCTGGGAGGTCCCTGAGACTCTCCTGTGCAGCCTCTGG |
| | | nucleic | ATTCACCTTCAGTAGCTATGGCATGCACTGGGTCCGCCAGGCTCCAGGCAAGGGGCTGGAGTGGGTGGCAGTTATAT |
| | | acid | CATATGATGGAAGTGATAAATACTATGCAGACTCCGTGAAGGGCCGATTCACCATCTCCAGAGACAATTCCAAGAAC |
| | | sequence | ACGCTGTATCTGCAAATGAACAGCCTGAGAGCTGAGGACACGGCTGTGTATTACTGTGCGAAAACAGTGGCTGGTTA |
| | | | TTACTACTACTACTACGGTATGGACGTCTGGGGCCAAGGGACCACGGTCACCGTCTCCTCA |
| 111 | IMPI-038 | VH domain | QVQLVESGGGVVQPGRSLRLSCAASGFTFSSYGMHWVRQAPGKGLEWVAVISYDGSDKYYADSVKGRFTISRDNSKN |
| | | amino acid | TLYLQMNSLRAEDTAVYYCAKTVAGYYYYYYGMDVWGQGTTVTVSS |
| | | sequence | |
| 112 | IMPI-038 | HCDR1 | GFTFSSYG |
| 113 | IMPI-038 | HCDR2 | ISYDGSDK |
| 114 | IMPI-038 | HCDR3 | AKTVAGYYYYYYGMDV |
| 115 | IMPI-038 | VL domain | GACATCCAGATGACCCAGTCTCCATCTTCCGTGTCTGCATCTGTTGGAGACAGAGTCACCGTCACTTGTCGGGCGAG |
| | | nucleic | TCAGGATATTAGTAGCTGGTTAGCCTGGTTTCAGCAGAAACCAGGGAAAGCCCCTAAATTCCTGATCTATGATGCAT |
| | | acid | CCAATTTGGAAAATGGAGTCCCATCAAGGTTCAGTGGCAGTGGATCTGGGACAGATTTCACCCTCACCATCAGCAGC |
| | | sequence | CTGCAGCCTGAAGATTTTGCAACTTACTATTGTCAACAAGCTAAAAGTTTCCCGTGGACGTTCGGCCAAGGGACCAA |
| | | | GGTGGAAATCAAC |
| 116 | IMPI-038 | VL domain | DIQMTQSPSSVSASVGDRVTVTCRASQDISSWLAWFQQKPGKAPKFLIYDASNLENGVPSRFSGSGSGTDFTLTISS |
| | | amino acid | LQPEDFATYYCQQAKSFPWTFGQGTKVEIN |
| | | sequence | |
| 117 | IMPI-038 | LCDR1 | QDISSW |
| 28 | IMPI-038 | LCDR2 | DAS |
| 118 | IMPI-038 | LCDR3 | QQAKSFPWT |
| 119 | IMPI-036 | VH domain | CAGGTGCAGCTGGTGCAGTCTGGGGCTGAGGTGAAGAAGCCTGGGGCCTCAGTGAAGGTCTCCTGCAAGGCTTCTGG |
| | | nucleic | ATACACCTTCACCAGTTATGATATCAACTGGGTGCGACAGGCCACTGGCCAAGGGCTTGAGTGGATGGGATGGATGA |
| | | acid | ACCCTATCAGTGGTAACACAGGCTATGCACAGAAGTTCCAGGGCAGAGTCACCATGACCAGAAACACCTCCATAAGC |
| | | sequence | ACAGCCTACATGGAGCTGAACAGCCTGAGATCTGAGGACACGGCCGTGTATTTCTGTGCGAGAGGCGGGCGATATTG |
| | | | TAGTGGTGTTAGCTGCTACTCCGGAGAGCCTTTTGACTACTGGGGCCAGGGAACCCTGGTCACCGTCTCCTCA |
| 120 | IMPI-036 | VH domain | QVQLVQSGAEVKKPGASVKVSCKASGYTFTSYDINWVRQATGQGLEWMGWMNPISGNTGYAQKFQGRVTMTRNTSIS |
| | | amino acid | TAYMELNSLRSEDTAVYFCARGGRYCSGVSCYSGEPFDYWGQGTLVTVSS |
| | | sequence | |
| 121 | IMPI-036 | HCDR1 | GYTFTSYD |
| 122 | IMPI-036 | HCDR2 | MNPISGNT |
| 123 | IMPI-036 | HCDR3 | ARGGRYCSGVSCYSGEPFDY |
| 124 | IMPI-036 | VL domain | GAAATTGTGCTGACTCAGTCTCCAGACTTTCAGTCTGTGACTCCAAAGGAGAAAGTCACCATCACCTGCCGGGCCAG |
| | | nucleic | TCAGAGCATTGGTAGTAGCTTACACTGGTACCAGCAGAAACCAGATCAGTCTCCAAAGCTCCTCATCAAGTATGCTT |
| | | acid | CCCAGTCCATCTCAGGGGTCCCCTCGAGGTTCAGTGGCAGTGGATCTGGGACAGATTTCACCCTCACCATCAATAGC |
| | | sequence | CTGGAAGCTGAAGATGCTGCAGCGTATTATTGTCATCAGAGTAGTAGTTTACCTCACACTTTCGGCCCTGGGACCAA |
| | | | AGTGGAGATCAAA |
| 125 | IMPI-036 | VL domain | EIVLTQSPDFQSVTPKEKVTITCRASQSIGSSLHWYQQKPDQSPKLLIKYASQSISGVPSRFSGSGSGTDFTLTINS |
| | | amino acid | LEAEDAAAYYCHQSSSLPHTFGPGTKVEIK |
| | | sequence | |
| 126 | IMPI-036 | LCDR1 | QSIGSS |
| 127 | IMPI-036 | LCDR2 | YAS |
| 128 | IMPI-036 | LCDR3 | HQSSSLPHT |
| 129 | IMPI-023 | VH domain | CAGGTGCAGCTGCAGGAGTCGGGCCCAGGACTGGTGAAGCCTTCGGGGACCCTGTCCCTCACCTGCGCTGTCTCTGG |
| | | nucleic | TGGCTCCATCAGCAGTAATAACTGGTGGAGTTGGGTCCGCCAGCCCCCAGGGAAGGGTCTGGAGTGGATTGGGGAAA |
| | | acid | TCGATCATAGTGGGAGCACCATGTACAACCCGTCCCTCAAGAGTCGAGTCACCATATCAGTAGACAAGTCCAAGAAC |
| | | sequence | CAGTTCTCCCTGAAGCTGAACTCTGTGACCGCCGCGGACACGGCCGTGTATTACTGTACGGGAGAGGGGTATAACTG |
| | | | GAACTACTGGGGCCAGGGGACCCTGGTCACCGTCTCCTCA |
| 130 | IMPI-023 | VH domain | QVQLQESGPGLVKPSGTLSLTCAVSGGSISSNNWWSWVRQPPGKGLEWIGEIDHSGSTMYNPSLKSRVTISVDKSKN |
| | | amino acid | QFSLKLNSVTAADTAVYYCTGEGYNWNYWGQGTLVTVSS |
| | | sequence | |
| 131 | IMPI-023 | HCDR1 | GGSISSNNW |
| 132 | IMPI-023 | HCDR2 | IDHSGST |
| 133 | IMPI-023 | HCDR3 | TGEGYNWNY |
| 134 | IMPI-023 | VL domain | GTTGTTGTGATGACTCAGTCTCCACTCTCCCTGCCCGTCACCCTTGGACAGCCGGCCTCCATCTCCTGCAGGTCTAG |
| | | nucleic | TCAAAGCCTCCTATACACTGATGGAAACACCTACTTGAGTTGGTTTCAGCAGAGGCCAGGCCAATCTCCAAGGCGCC |
| | | acid | TAATTTATAAGGTTTCTAACTGGGACTCTGGGGTCCCAGACAGATTCAGCGGCAGTGGGTCAGGCACTGATTTCACA |
| | | sequence | CTGAAAATCAGCAGGGTGGAGGCTGAAGATGTTGGGATTTATTACTGCATGCAAGGTACACACTGGCCGCTCACTTT |
| | | | CGGCGGAGGGACCAAGGTGGAGATCAAA |
| 135 | IMPI-023 | VL domain | VVVMTQSPLSLPVTLGQPASISCRSSQSLLYTDGNTYLSWFQQRPGQSPRRLIYKVSNWDSGVPDRFSGSGSGTDFT |
| | | amino acid | LKISRVEAEDVGIYYCMQGTHWPLTFGGGTKVEIK |
| | | sequence | |
| 136 | IMPI-023 | LCDR1 | QSLLYTDGNTY |
| 85 | IMPI-023 | LCDR2 | KVS |
| 86 | IMPI-023 | LCDR3 | MQGTHWPLT |
| 137 | IMPI-019 | VH domain | CAGGTGCAGCTGCAGGAGTCGGGCCCAGGACTGATAAAGCCTTCGGGGACCCTGTCCCTCACCTGCGCTGTCTCTGG |
| | | nucleic | TGGCTCCATCAGCAGTAATACCTGGTGGAGTTGGGTCCGCCAGCCCCCAGGGAAGGGTCTGGAGTGGATTGGGGAAA |
| | | acid | TCTATCATAGTGGGAGCACCATGTACAACCCGTCCCTCAAGAGTCGAGTCACCATATCAGTAGACAAGTCCAAGAAC |
| | | sequence | CAGTTCTCCCTGAAGTTGAACTCTGTGACCGCCGCGGACACGGCCGTGTATTACTGTACGGGAGAGGGGCATAACTG |
| | | | GAACTACTGGGGCCAGGGGACCCTGGTCACCGTCTCCTCA |
| 138 | IMPI-019 | VH domain | QVQLQESGPGLIKPSGTLSLTCAVSGGSISSNTWWSWVRQPPGKGLEWIGEIYHSGSTMYNPSLKSRVTISVDKSKN |
| | | amino acid | QFSLKLNSVTAADTAVYYCTGEGHNWNYWGQGTLVTVSS |
| | | sequence | |
| 139 | IMPI-019 | HCDR1 | GGSISSNTW |
| 140 | IMPI-019 | HCDR2 | IYHSGST |
| 141 | IMPI-019 | HCDR3 | TGEGHNWNY |
| 142 | IMPI-019 | VL domain | GATGTTGTGTTGACTCAGTCTCCACTCTCCCTGCCCGTCACCCTTGGACAGCCGGCCTCCATCTCCTGCAGGTCTAG |
| | | nucleic | TCAAAGCCTCGTATACACTGATGGAAACACCTACTTGAGTTGGTTTCAGCAGAGGCCAGGCCAATCTCCAAGGCGCC |
| | | acid | TAATTTATAAGGTTTCTAACTGGGAATCTGGGGTCCCAGACAGATTCAGCGGCAGTGGGTCAGGCACTGATTTCACA |
| | | sequence | CTGAAAATCAGCAGGGTGGAGGCTGAAGATGTTGGGATTTATTACTGCATGCAAGGTACACACTGGCCGCTCACTTT |
| | | | CGGCGGAGGGACCAAGGTGGAGATCAAA |
| 143 | IMPI-019 | VL domain | DVVLTQSPLSLPVTLGQPASISCRSSQSLVYTDGNTYLSWFQQRPGQSPRRLIYKVSNWESGVPDRFSGSGSGTDFT |
| | | amino acid | LKISRVEAEDVGIYYCMQGTHWPLTFGGGTKVEIK |
| | | sequence | |
| 144 | IMPI-019 | LCDR1 | QSLVYTDGNTY |
| 85 | IMPI-019 | LCDR2 | KVS |
| 86 | IMPI-019 | LCDR3 | MQGTHWPLT |
| 145 | IMPI-008 | VH domain | GAAGTGCAGCTGGTGGAGTCTGGGGGAGGCTTGGTACAGCCTGGCAGGTCCCTGAGACTCTCCTGTGCAGCCTCTGG |
| | | nucleic | ATTCACCTTTGATGATTATGCCATGCACTGGGTCCGGCAAGCTCCAGGGAAGGGCCTGGAGTGGGTCTCAGGTATTA |
| | | acid | GTTGGAATAGTGGTAGCATAGGTTATGCGGACTCTGTGAAGGGCCGATTCACCATCTCCAGAGACAACGCCAAGAAC |
| | | sequence | TCCCTGTATCTGCAAATGAACAGTCTGAGAGTTGAGGACACGGCCTTGTATTACTGTGCAAAAGATCTCCAGGGGGA |
| | | | CTACTACTACTACGGTGTGGACGTCTGGGGCCAAGGGACCACGGTCACCGTCTCCTCA |
| 146 | IMPI-008 | VH domain | EVQLVESGGGLVQPGRSLRLSCAASGFTFDDYAMHWVRQAPGKGLEWVSGISWNSGSIGYADSVKGRFTISRDNAKN |
| | | amino acid | SLYLQMNSLRVEDTALYYCAKDLQGDYYYYGVDVWGQGTTVTVSS |
| | | sequence | |
| 22 | IMPI-008 | HCDR1 | GFTFDDYA |
| 23 | IMPI-008 | HCDR2 | ISWNSGSI |
| 147 | IMPI-008 | HCDR3 | AKDLQGDYYYYGVDV |
| 148 | IMPI-008 | VL domain | GCCATCCAGTTGACCCAGTCTCCATCCTCCCTGTCTGCATCTGTAGGAGACAGAGTCACCATCACTTGCCGGGCAAG |
| | | nucleic | TCAGGGCATTAGCAGTGCTTTAGCCTGGTATCAGCAGAAACCAGGGAAACCTCCTAAGCTCCTGATCTATGATGCCT |
| | | acid | CCAGTTTGGTAAGTGGGGTCCCATCAAGATTCAGCGGCAGTAGATCTGGGACAGATTTCACTCTCACCATCAGCAGC |
| | | sequence | CTGCAACCTGAGGATTTTGCAACTTATTACTGTCAACAGTTTATTAGTTACCCGCTCACTTTCGGCGGAGGGACCAG |
| | | | GGTGGAGATCAAA |
| 149 | IMPI-008 | VL domain | AIQLTQSPSSLSASVGDRVTITCRASQGISSALAWYQQKPGKPPKLLIYDASSLVSGVPSRFSGSRSGTDFTLTISS |
| | | amino acid | LQPEDFATYYCQQFISYPLTFGGGTRVEIK |
| | | sequence | |
| 37 | IMPI-008 | LCDR1 | QGISSA |
| 28 | IMPI-008 | LCDR2 | DAS |
| 69 | IMPI-008 | LCDR3 | QQFISYPLT |
| 150 | IMPI-004 | VH domain | CAGGTGCAGCTGGTGGAGTCTGGGGGAGGCGTGGTCCAGCCTGGGAGGTCCCTGAGACTCTCCTGTGCAGCGTCTGG |
| | | nucleic | ATTCACCTTCAGTAGCTATGGCATGCACTGGGTCCGCCAGGCTCCAGGCAAGGGGCTGGAGTGGGTGGCAGTTATAT |
| | | acid | GGTATGATGGAGGTAATAAATACTATGCAGACTCCGTGAAGGGCCGATTCACCATCTCCAGAGACAATTCTAAGAAC |
| | | sequence | ACGCTGTATCTGCAAATGAACAGCCTGAGAGCCGAGGACACGGCTGTGTATTACTGTGCGAGAGTTAATGTACTAAT |
| | | | GGGCTACGGTATGGACGTCTGGGGCCAAGGGACCACGGTCACCGTCTCCTCA |
| 151 | IMPI-004 | VH domain | QVQLVESGGGVVQPGRSLRLSCAASGFTFSSYGMHWVRQAPGKGLEWVAVIWYDGGNKYYADSVKGRFTISRDNSKN |
| | | amino acid | TLYLQMNSLRAEDTAVYYCARVNVLMGYGMDVWGQGTTVTVSS |
| | | sequence | |
| 112 | IMPI-004 | HCDR1 | GFTFSSYG |
| 152 | IMPI-004 | HCDR2 | IWYDGGNK |
| 153 | IMPI-004 | HCDR3 | ARVNVLMGYGMDV |
| 154 | IMPI-004 | VL domain | GAAATTGTGTTGACGCAGTCTCCAGGCACCCTGTCTTTGTCTCCAGGGGATAAAGCCACCCTCTCCTGCAGGGCCAG |
| | | nucleic | TCAGAGTATCATCAGCAGCTTCTTAGCCTGGTACCAGCAGAAACCTGGCCAGGCTCCCAGGCTCCTCATCTATGGTG |
| | | acid | CATCCAGCAGGGCCACTGGCATCCCAGACAGGTTCAGTGGCAGTGGGTCTGGGACAGACTTCACTCTCACCATCAGC |
| | | sequence | AGACTGGAACCTGAAGATTTTGCAGTGTATTACTGTCAGCAGTATGGTAGCTCGCTCACTTTCGGCGGAGGGACCAA |
| | | | GGTGGAGATCAAA |
| 155 | IMPI-004 | VL domain | EIVLTQSPGTLSLSPGDKATLSCRASQSIISSFLAWYQQKPGQAPRLLIYGASSRATGIPDRFSGSGSGTDFTLTIS |
| | | amino acid | RLEPEDFAVYYCQQYGSSLTFGGGTKVEIK |
| | | sequence | |
| 156 | IMPI-004 | LCDR1 | QSIISSF |
| 157 | IMPI-004 | LCDR2 | GAS |
| 158 | IMPI-004 | LCDR3 | QQYGSSLT |
| 159 | IMPI-012 | VH domain | GAGGTGCAGCTGGTGGAGTCTGGAGGAGGCTTGATCCAGCCTGGGGGGTCCCTGAGACTCTCCTGTGCAGCCTCTGG |
| | | nucleic | GATCACCGTCAGTAGCAACTACATGAGCTGGGTCCGCCAGGCTCCAGGGAAGGGGCTGGAGTGGGTCTCAGTTATTT |
| | | acid | ATAGCGGTGGTACTACAAACTACGCAGACTCCGTGAAGGGCCGATTCACCATCTCCAGAGACAATTCCAAGAACACG |
| | | sequence | CTGTATCTTCAAATGAACAGCCTGAGAGCCGAGGACACGGCCGTGTATTACTGTGCGAGAGATACGGTGGTCTACGG |
| | | | TATGGACGTCTGGGGCCAAGGGACCACGGTCACCGTCTCCTCA |
| 160 | IMPI-012 | VH domain | EVQLVESGGGLIQPGGSLRLSCAASGITVSSNYMSWVRQAPGKGLEWVSVIYSGGTTNYADSVKGRFTISRDNSKNT |
| | | amino acid | LYLQMNSLRAEDTAVYYCARDTVVYGMDVWGQGTTVTVSS |
| | | sequence | |
| 161 | IMPI-012 | HCDR1 | GITVSSNY |
| 4 | IMPI-012 | HCDR2 | IYSGGTT |
| 5 | IMPI-012 | HCDR3 | ARDTVVYGMDV |
| 162 | IMPI-012 | VL domain | GACATCCAGTTGACCCAGTCTCCATCCTTCCTGTCTGCATCTGTAGGAGACAGAGTCACCATCACTTGCTGGGCCAG |
| | | nucleic | TCAGGGCATTAGCAGTTATTTAGCCTGGTATCAGCAAAAACCAGGGAAAGCCCCTAAGCTCCTGATCTATGCTGCAT |
| | | acid | CCACTTTGCAAAGTGGGGTCCCATCAAGGTTCAGCGGCAGTGGATCTGGGACAGAATTCACTCTCACAATCAGCAGC |
| | | sequence | CTGCAGCCTGAAGATTTTGCAACTTATTACTGTCAACAGCTTAATAGTCACCCGCTCACTTTCGGCGGAGGGACCAA |
| | | | GGTGGAGATCAAA |
| 163 | IMPI-012 | VL domain | DIQLTQSPSFLSASVGDRVTITCWASQGISSYLAWYQQKPGKAPKLLIYAASTLQSGVPSRFSGSGSGTEFTLTISS |
| | | amino acid | LQPEDFATYYCQQLNSHPLTFGGGTKVEIK |
| | | sequence | |
| 8 | IMPI-012 | LCDR1 | QGISSY |
| 18 | IMPI-012 | LCDR2 | AAS |
| 164 | IMPI-012 | LCDR3 | QQLNSHPLT |
| 165 | IMPI-010 | VH domain | GAAGTGCAGCTGGTGGAGTCTGGGGGAGGCTTGGTACAGCCTGGCAGGTCCCTGAGACTCTCCTGTGCAGCCTCTGG |
| | | nucleic | ATTCACCTTTGATGATTATGCCATGCACTGGGTCCGGCAAGCTCCAGGGAAGGGCCTGGAGTGGGTCTCAGGTATTA |
| | | acid | GTTGGAATAGTGGTAGCATAGGCTATGCGGACTCTGTGAAGGGCCGATTCACCATCTCCAGAGACAACGCCAAGAAC |
| | | sequence | TCCCTGTATCTGCAAATGAACAGTCTGAGAGCTGAGGACACGGCCTTGTATTACTGTGCAAAAGATCTCCAGGGGGA |
| | | | CGACTACTACTACGGTGTGGACGTCTGGGGCCAAGGGACCACGGTCACCGTCTCCTCA |
| 166 | IMPI-010 | VH domain | EVQLVESGGGLVQPGRSLRLSCAASGFTFDDYAMHWVRQAPGKGLEWVSGISWNSGSIGYADSVKGRFTISRDNAKN |
| | | amino acid | SLYLQMNSLRAEDTALYYCAKDLQGDDYYYGVDVWGQGTTVTVSS |
| | | sequence | |
| 22 | IMPI-010 | HCDR1 | GFTFDDYA |
| 23 | IMPI-010 | HCDR2 | ISWNSGSI |
| 167 | IMPI-010 | HCDR3 | AKDLQGDDYYYGVDV |
| 168 | IMPI-010 | VL domain | GCCATCCAGTTGACCCAGTCTCCATCCTCCCTGTCTGCATCTGTAGGAGACAGAGTCACCATCACTTGCCGGGCAAG |
| | | nucleic | TCAGGACATTAGCAGTGCTTTAGCCTGGTATCAGCAGAAACCAGGGAAAGCTCCTAAGCTCCTGATCTATGATGCCT |
| | | acid | CCAGTTTGGAAAGTGGGGTCCCATCAAGGTTCAGCGGCAGTAGATCTGGGACAGATTTCACTCTCACCATCAGCAGC |
| | | sequence | CTGCAACCTGAAGATTTTGCAAATTATTACTGTCAACAGTTTATTAGTTACCCGCTCACTTTCGGCGGAGGGACCAA |
| | | | GGTGGAGATCAAA |
| 169 | IMPI-010 | VL domain | AIQLTQSPSSLSASVGDRVTITCRASQDISSALAWYQQKPGKAPKLLIYDASSLESGVPSRFSGSRSGTDFTLTISS |
| | | amino acid | LQPEDFANYYCQQFISYPLTFGGGTKVEIK |
| | | sequence | |
| 67 | IMPI-010 | LCDR1 | QDISSA |
| 28 | IMPI-010 | LCDR2 | DAS |
| 69 | IMPI-010 | LCDR3 | QQFISYPLT |
| 170 | IMPI-017 | VH domain | GAGGTGCAGCTGGTGGAGTCTGGAGGAGGCTTGATCCAGCCGGGGGGGTCCCTGAGACTCTCCTGTGCAGCCGCTGG |
| | | nucleic | GTTAACCGTCAGTAGCAACTATATGAACTGGGTCCGCCAGGTTCCAGGGAAGGGGCTGGAGTGGGTCTCAGTTATTT |
| | | acid | ATAGCGGTGGTAGCACATACTACGCAGACTCCGTGAAGGGCCGATTCACCATCTCCAGAGACAATTCCAAGAACACG |
| | | sequence | CTGTATCTTCAAATGAACAGTCTGAGAGCCGAGGACACGGCCGTGTATTACTGTGCGAGAGATCTGGGTACCCTGGG |
| | | | TATGGACGTCTGGGGCCAAGGGACCACGGTCACCGTCTCCTCA |
| 171 | IMPI-017 | VH domain | EVQLVESGGGLIQPGGSLRLSCAAAGLTVSSNYMNWVRQVPGKGLEWVSVIYSGGSTYYADSVKGRFTISRDNSKNT |
| | | amino acid | LYLQMNSLRAEDTAVYYCARDLGTLGMDVWGQGTTVTVSS |
| | | sequence | |
| 172 | IMPI-017 | HCDR1 | GLTVSSNY |
| 14 | IMPI-017 | HCDR2 | IYSGGST |
| 173 | IMPI-017 | HCDR3 | ARDLGTLGMDV |
| 174 | IMPI-017 | VL domain | GACATCCAGTTGACCCAGTCTCCATCCTTCCTGTCTGCATCTGTAGGAGACAGAGTCACCATCACTTGCTGGGCCAG |
| | | nucleic | TCAGGGCATTAGCACTTATTTAGCCTGGTATCAGCAAAAACCAGGGAAAGCCCCTAAGCTCCTGATCTATGCTGCAT |
| | | acid | CCACTTTGCAGAGCGGGGTCCCATCAAGGTTCAGCGGCAGTGGATCTGGGACAGAATTCACTCTCACAATCAGCAGC |
| | | sequence | CTGCAGCCTGAAGATTTTGCAACTTATTACTGTCAGCAGCTTAACAGTTACCTTCCGACGTTCGGCCAAGGGACCAA |
| | | | GGTGGAAATCAAA |
| 175 | IMPI-017 | VL domain | DIQLTQSPSFLSASVGDRVTITCWASQGISTYLAWYQQKPGKAPKLLIYAASTLQSGVPSRFSGSGSGTEFTLTISS |
| | | amino acid | LQPEDFATYYCQQLNSYLPTFGQGTKVEIK |
| | | sequence | |
| 176 | IMPI-017 | LCDR1 | QGISTY |
| 18 | IMPI-017 | LCDR2 | AAS |
| 177 | IMPI-017 | LCDR3 | QQLNSYLPT |
| 178 | IMPI-037 | VH domain | GAGGTGCAGCTGGTGGAGTCTGGGGGAGGCTTGGTAAAGCCTGGGGGGTCCCTTAGACTCTCCTGTGCAGCCTCTGG |
| | | nucleic | ATTCACTTTCAGTAACGCCTGGATGAGCTGGGTCCGCCAGGCTCCAGGGAAGGGGCTGGAGTGGGTTGGCCGTATTA |
| | | acid | AAAACAAAGCTGATGGTGGGACAACAGACTACGCTGCACCCGTGAAAGGCAGATTCACCATCTCAAGAGATGATTCA |
| | | sequence | AAAAACACGTTGTATCTGCAAATGAACAGCCTGAAAACCGAGGACACAGCCGTGTATTACTGTACCACAGAGGAATT |
| | | | ACTATGGTTCGGGGAGTCGCCCTTTGACTGCTGGGGCCAGGGAACCCTGGTCACCGTCTCCTCA |
| 179 | IMPI-037 | VH domain | EVQLVESGGGLVKPGGSLRLSCAASGFTFSNAWMSWVRQAPGKGLEWVGRIKNKADGGTTDYAAPVKGRFTISRDDS |
| | | amino acid | KNTLYLQMNSLKTEDTAVYYCTTEELLWFGESPFDCWGQGTLVTVSS |
| | | sequence | |
| 180 | IMPI-037 | HCDR1 | GFTFSNAW |
| 181 | IMPI-037 | HCDR2 | IKNKADGGTT |
| 182 | IMPI-037 | HCDR3 | TTEELLWFGESPFDC |
| 183 | IMPI-037 | VL domain | GACATCCAGTTGACCCAGTCTCCATCCTTCCTGTCTGCATCTGTAGGAGACAGAGTCACCATCACTTGCTGGGCCAG |
| | | nucleic | TCAGGGCATTAACAGTTATTTAGCCTGGTATCAGCAAAAACCAGGGAAAGCCCCTAAGCTCCTGATCTATGCTGCAT |
| | | acid | CCACTTTGCAAAGTGGGGTCCCATCAAGGTTCAGCGGCAGTGGATCTGGGACAGAATTCACTCTCACAATCAGCAGC |
| | | sequence | CTGCAGCCTGAAGATTTTACAACTTATTACTGTCAACAATTTAATGATTACCCTCGGACGTTCGGCCCAGGGACCAA |
| | | | GGTGGAAATCAAA |
| 184 | IMPI-037 | VL domain | DIQLTQSPSFLSASVGDRVTITCWASQGINSYLAWYQQKPGKAPKLLIYAASTLQSGVPSRFSGSGSGTEFTLTISS |
| | | amino acid | LQPEDFTTYYCQQFNDYPRTFGPGTKVEIK |
| | | sequence | |
| 185 | IMPI-037 | LCDR1 | QGINSY |
| 18 | IMPI-037 | LCDR2 | AAS |
| 186 | IMPI-037 | LCDR3 | QQFNDYPRT |
| 187 | IMPI-022 | VH domain | GAAGTGCAGCTGGTGGAGTCTGGGGGAGGCTTGGTACAGCCTGGCAGGTCCCTGAGACTCTCCTGTGCAGCCTCTGG |
| | | nucleic | ATTCACCTTTGATGATTATGCCATGCACTGGGTCCGGCAAGCTCCAGGGAAGGGCCTGGAGTGGGTCTCAGGTATTA |
| | | acid | CTTGGAATAGTGGTAGCATAGGTTATGCGGACTCTGTGAAGGGCCGATTCACCATCTCCAGAGACAACGCCAAGAAC |
| | | sequence | TCCCTGTATCTGCACATGAACAGTCTGAGAGTTGAGGACACGGCCTTGTATTACTGTGCAAAAGATCTCCAGGGGGA |
| | | | CTACTACTACTACGGTGTGGACGTCTGGGGCCAAGGGACCACGGTCACCGTCTCCTCA |
| 188 | IMPI-022 | VH domain | EVQLVESGGGLVQPGRSLRLSCAASGFTFDDYAMHWVRQAPGKGLEWVSGITWNSGSIGYADSVKGRFTISRDNAKN |
| | | amino acid | SLYLHMNSLRVEDTALYYCAKDLQGDYYYYGVDVWGQGTTVTVSS |
| | | sequence | |
| 22 | IMPI-022 | HCDR1 | GFTFDDYA |
| 63 | IMPI-022 | HCDR2 | ITWNSGSI |
| 147 | IMPI-022 | HCDR3 | AKDLQGDYYYYGVDV |
| 189 | IMPI-022 | VL domain | GCCATCCAGTTGACCCAGTCTCCATCCTCCCTGTCTGCATCTGTAGGAGACAGAGTCACCATCACTTGCCGGGCAAG |
| | | nucleic | TCAGGGCATTAGCAGTGCTTTAGCCTGGTATCAGCAGAAGCCAGGGAAAGCTCCTAAACTCCTGCTCTATGATGCCT |
| | | acid | CCAGTTTGGTAAGTGGGGTCCCATCAAGATTCAGCGGCAGTAGATCTGGGACAGATTTCACTCTCACCATCAGCAGC |
| | | sequence | CTGCAACCTGAGGATTTTGCAACTTATTACTGTCAACAGTTTATTAGTTACCCGCTCACTTTCGGCGGAGGGACCAG |
| | | | GGTGGAGATCAAA |
| 190 | IMPI-022 | VL domain | AIQLTQSPSSLSASVGDRVTITCRASQGISSALAWYQQKPGKAPKLLLYDASSLVSGVPSRFSGSRSGTDFTLTISS |
| | | amino acid | LQPEDFATYYCQQFISYPLTFGGGTRVEIK |
| | | sequence | |
| 37 | IMPI-022 | LCDR1 | QGISSA |
| 28 | IMPI-022 | LCDR2 | DAS |
| 69 | IMPI-022 | LCDR3 | QQFISYPLT |
| 191 | IMPI-058 | VH domain | GAGGTGCAGCTGGTGCAGTCTGGAGCAGAGGTGAAAAAGCCCGGGGAGTCTCTGAAGATCTCCTGTAAGGGTTCTGG |
| | | nucleic | ATACAGCTTTAGCAGCTACTGGATCGGCTGGGTGCGCCAGATGCCCGGGAAAGGCCTGGAGTGGATGGGGATCATCT |
| | | acid | ATCCTGGTGACTCTGAAACCAGATACAGCCCGTCCTTCCAAGGCCAGGTCACCATCTCAGCCGACAAGTCCATCAGC |
| | | sequence | ACCGCCTACCTGCAGTGGAGCAGCCTGAAGGCCTCGGACACCGCCATGTATTACTGTGCGAGGTCGTATAACTGGAA |
| | | | CTACTTTGACTACTGGGGCCAGGGAACCCTGGTCACCGTCTCCTCA |
| 192 | IMPI-058 | VH domain | EVQLVQSGAEVKKPGESLKISCKGSGYSFSSYWIGWVRQMPGKGLEWMGIIYPGDSETRYSPSFQGQVTISADKSIS |
| | | amino acid | TAYLQWSSLKASDTAMYYCARSYNWNYFDYWGQGTLVTVSS |
| | | sequence | |
| 193 | IMPI-058 | HCDR1 | GYSFSSYW |
| 194 | IMPI-058 | HCDR2 | IYPGDSET |
| 34 | IMPI-058 | HCDR3 | ARSYNWNYFDY |
| 195 | IMPI-058 | VL domain | GCCATCCAGTTGACCCAGTCTCCATCCTCCCTGTCTGCATCTGTAGGGGACAGAGTCATCATCACTTGCCGGGCAAG |
| | | nucleic | TCAGGGCATTAGCAGTGCTTTAGCCTGGTATCAGCAGAAACCAGGGAAAGCTCTTAAACTCCTGATCTATGATGCCT |
| | | acid | CCAGTTTGGAAAGTGGGGTCCCATCAAGGTTCAGCGGCAGTGGATCTGGGACAGATTTCACTCTCACCATCACCAGC |
| | | sequence | CTGCAGCCTGAAGATTTTGCAACTTATTACTGTCAACAGTTTAGTAGTTACCCTTGGACGTTCGGCCAAGGGACCAA |
| | | | GGTGGAAATCAAA |
| 196 | IMPI-058 | VL domain | AIQLTQSPSSLSASVGDRVIITCRASQGISSALAWYQQKPGKALKLLIYDASSLESGVPSRFSGSGSGTDFTLTITS |
| | | amino acid | LQPEDFATYYCQQFSSYPWTFGQGTKVEIK |
| | | sequence | |
| 37 | IMPI-058 | LCDR1 | QGISSA |
| 28 | IMPI-058 | LCDR2 | DAS |
| 197 | IMPI-058 | LCDR3 | QQFSSYPWT |
| 198 | IMPI-024 | VH domain | GAGGTGCAGCTGGTGCAGTCTGGAGCAGAGGTGAAAAAGCCCGGGGAGTCTCTGAAGATCTCCTGTAAGGGTTCTGG |
| | | nucleic | ATACAGCTTTACCAGCTACTGGATCGGCTGGGTGCGCCAGATGCCCGGGAAAGGCCTGGAGTGGATGGGGATCATCT |
| | | acid | ATCCTGGTGACTCTGATACCAGATACAGCCCGTCCTTCCAAGGCCAGGTCACCATCTCAGCCGACAAGTCCATCAGC |
| | | sequence | ACCGCCTACCTGCAGTGGAGCAGCCTGAAGGCCTCGGACACCGCCATGTATTACTGTGTGAGGTCGTATAATTGGAA |
| | | | CTACTTTGACTACTGGGGCCAGGGAACCCTGGTCACCGTCTCCTCA |
| 199 | IMPI-024 | VH domain | EVQLVQSGAEVKKPGESLKISCKGSGYSFTSYWIGWVRQMPGKGLEWMGIIYPGDSDTRYSPSFQGQVTISADKSIS |
| | | amino acid | TAYLQWSSLKASDTAMYYCVRSYNWNYFDYWGQGTLVTVSS |
| | | sequence | |
| 32 | IMPI-024 | HCDR1 | GYSFTSYW |
| 33 | IMPI-024 | HCDR2 | IYPGDSDT |
| 200 | IMPI-024 | HCDR3 | VRSYNWNYFDY |
| 201 | IMPI-024 | VL domain | GCCATCCAGTTGACCCAGTCTCCATCCTCCCTGTCTGCATCTGTAGGAGACAGAGTCACCATCACTTGCCGGGCAAG |
| | | nucleic | TCAGGGCATTAGCAGTGGTTTAGCCTGGTATCAGCAGAAAGCAGGGAAAGCTCCTAAGCTCCTGATCTATGATGTCT |
| | | acid | CCAGTTTGGAAAGTGGGGTCCCATCAAGGTTCAGCGGCAGTGGATCTGGGACAGATTTCACTCTCACCATCAGCAGC |
| | | sequence | CTGCAGCCTGAAGATTTTGCAACTTATTACTGTCAACAGTTTCTTAGTTACCCTTGGACGTTCGGCCAAGGGACCAA |
| | | | GGTGGAAATCAAA |
| 202 | IMPI-024 | VL domain | AIQLTQSPSSLSASVGDRVTITCRASQGISSGLAWYQQKAGKAPKLLIYDVSSLESGVPSRFSGSGSGTDFTLTISS |
| | | amino acid | LQPEDFATYYCQQFLSYPWTFGQGTKVEIK |
| | | sequence | |
| 92 | IMPI-024 | LCDR1 | QGISSG |
| 203 | IMPI-024 | LCDR2 | DVS |
| 204 | IMPI-024 | LCDR3 | QQFLSYPWT |
| 205 | IMPI-039 | VH domain | CAGGTGCAGCTGCAGGAGTCGGGCCCAGGACTGGTGAAGCCTTCGGAGACCCTGTCCCTCACCTGCGCTGTCTCGGG |
| | | nucleic | TGGCTCCATCAGCAGAAGTACCTGGTGGAGTTGGGTCCGCCAGCCCCCAGGGAAGGGGCTGGAGTGGATTGGGGAAA |
| | | acid | TCTCTCATAGTGGGAGTACCAAATACAACCCGTCCCTCAAGAGTCGAGTCACCATATCAGTAGACAAGTCCAAGAAC |
| | | sequence | CAGTTCTCCCTGAAGCTGAGCTCTGTGACCGCCGCGGACACGGCCGTATATTACTGTGCGGGAGAGGGGTCTAACTG |
| | | | GAGTTACTGGGGCCAGGGAACCCTGGTCACCGTCTCCTCA |
| 206 | IMPI-039 | VH domain | QVQLQESGPGLVKPSETLSLTCAVSGGSISRSTWWSWVRQPPGKGLEWIGEISHSGSTKYNPSLKSRVTISVDKSKN |
| | | amino acid | QFSLKLSSVTAADTAVYYCAGEGSNWSYWGQGTLVTVSS |
| | | sequence | |
| 79 | IMPI-039 | HCDR1 | GGSISRSTW |
| 80 | IMPI-039 | HCDR2 | ISHSGST |
| 207 | IMPI-039 | HCDR3 | AGEGSNWSY |
| 208 | IMPI-039 | VL domain | GATGTTGTGATGACTCAGTCTCCACACTCCCTGCCCGTCACCCTTGGACAGCCGGCCTCCATCTCCTGCAGGTCTAG |
| | | nucleic | TCAAAGCCTCGTATACAGTGATGGAAACACATATTTGAGTTGGTTTCAGCAGAGGCCAGGCCAATCTCCAAGGCGCC |
| | | acid | TAATTTATAAGGTTTCTAAATGGGACGCTGGGGTCCCAGACAGATTCAGCGGCAGTGGGTCAGGCACTGATTTCACA |
| | | sequence | CTGAAAATCAGCAGGGTGGAGGCTGAGGATATTGGGATTTATTACTGCATGCAAGGTACACACTGGCCGCTCACTTT |
| | | | CGGCGGAGGGACCAAGGTGGAGCTCAAA |
| 209 | IMPI-039 | VL domain | DVVMTQSPHSLPVTLGQPASISCRSSQSLVYSDGNTYLSWFQQRPGQSPRRLIYKVSKWDAGVPDRFSGSGSGTDFT |
| | | amino acid | LKISRVEAEDIGIYYCMQGTHWPLTFGGGTKVELK |
| | | sequence | |
| 84 | IMPI-039 | LCDR1 | QSLVYSDGNTY |
| 85 | IMPI-039 | LCDR2 | KVS |
| 86 | IMPI-039 | LCDR3 | MQGTHWPLT |
| 210 | IMPI-020 | VH domain | CAGGTGCAGCTGCAGGAGTCGGGCCCAGGACTGGTGAAGCCTTCGGGGACCCTGTCCCTCACCTGCGCTGTCTCTGG |
| | | nucleic | TGGCTCCATCAGCAGTAGTAACTGGTGGAGTTGGGTCCGCCAGCCCCCAGGGAAGGGGCTGGAGTGGATTGGGGAAA |
| | | acid | TCTATCATAGTGGGAGCACCATGTACAACCCGTCCCTCAAGAGTCGAGTCACCATATCAGTAGACAAGTCCAAGAAC |
| | | sequence | CAGTTCTCCCTGAAGCTGAGCTCTGTGACCGCCGCGGACACGGCCGTGTATTACTGTACGGGAGAGGGGTATAACTG |
| | | | GAACTACTGGGGCCAGGGAACCCTGGTCACCGTCTCCTCA |
| 211 | IMPI-020 | VH domain | QVQLQESGPGLVKPSGTLSLTCAVSGGSISSSNWWSWVRQPPGKGLEWIGEIYHSGSTMYNPSLKSRVTISVDKSKN |
| | | amino acid | QFSLKLSSVTAADTAVYYCTGEGYNWNYWGQGTLVTVSS |
| | | sequence | |
| 212 | IMPI-020 | HCDR1 | GGSISSSNW |
| 140 | IMPI-020 | HCDR2 | IYHSGST |
| 133 | IMPI-020 | HCDR3 | TGEGYNWNY |
| 213 | IMPI-020 | VL domain | GATGTTGTGTTGACTCAGTCTCCACTCTCCCTGCCCGTCACCCTTGGACAGCCGGCCTCCATCTCCTGCAGGTCTAG |
| | | nucleic | TCAAAGCCTCGTATACAGTGATGGAAACACCTACTTGAGTTGGTTTCAACAGAGGCCAGGCCAATCTCCAAGGCGCC |
| | | acid | TAATTTATAAGGTTTCTAACTGGGACTCTGGGGTCCCAGACAGATTCAGCGGCAGTGGGTCAGGCTCTGATTTCACA |
| | | sequence | CTGAAGATCAGCAGGGTGGAGGCTGAGGATGTTGGGGTTTATTACTGCATGCAAGGTACACACTGGCCGCTCACTTT |
| | | | CGGCGGAGGGACCAAGGTGGAGATCAAA |
| 214 | IMPI-020 | VL domain | DVVLTQSPLSLPVTLGQPASISCRSSQSLVYSDGNTYLSWFQQRPGQSPRRLIYKVSNWDSGVPDRFSGSGSGSDFT |
| | | amino acid | LKISRVEAEDVGVYYCMQGTHWPLTFGGGTKVEIK |
| | | sequence | |
| 84 | IMPI-020 | LCDR1 | QSLVYSDGNTY |
| 85 | IMPI-020 | LCDR2 | KVS |
| 86 | IMPI-020 | LCDR3 | MQGTHWPLT |
| 215 | IMPI-053 | VH domain | CAGGTGCAGCTGCAGGAGTCGGGCCCAGGACTGGTGAAACCTTCGGAGACCCTGTCCCTCACCTGCGCTGTCTCGGG |
| | | nucleic | TGGCTCCATCAGCAGAAGTACCTGGTGGAGTTGGGTCCGCCAGCCCCCAGGGAAGGGGCTGGAGTGGATTGGGGAAA |
| | | acid | TCTATCATAGTGGGAGCACCAAATACAACCCGTCCCTCAAGAGTCGAGTCACCATATCAGTAGACAAGTCCAAGAAC |
| | | sequence | CAGTTCTCCCTGAAGCTGAGCTCTGTGACCGCCGCGGACACGGCCGTGTATTACTGTGCGGGAGAGGGGTCTAACTG |
| | | | GAGCTACTGGGGCCAGGGAACCCTGGTCACCGTCTCCTCA |
| 216 | IMPI-053 | VH domain | QVQLQESGPGLVKPSETLSLTCAVSGGSISRSTWWSWVRQPPGKGLEWIGEIYHSGSTKYNPSLKSRVTISVDKSKN |
| | | amino acid | QFSLKLSSVTAADTAVYYCAGEGSNWSYWGQGTLVTVSS |
| | | sequence | |
| 79 | IMPI-053 | HCDR1 | GGSISRSTW |
| 140 | IMPI-053 | HCDR2 | IYHSGST |
| 207 | IMPI-053 | HCDR3 | AGEGSNWSY |
| 217 | IMPI-053 | VL domain | GATGTTGTGATGACTCAGTCTCCAGTCTCCCTGCCCGTCACCCTTGGACAGCCGGCCTCCATCTCCTGCAGGTCTAG |
| | | nucleic | TCAAAGCCTCATATACAGTGATGGAAACACCTACTTGAGTTGGTTTCAGCAGAGGCCAGGCCAATCTCCAAGGCGCC |
| | | acid | TAATTTATAAGGTTTCTAACTGGGACTCTGGGGTCCCAGACAGATTCAGCGGCAGTGGGTCAGGCACTGATTTCACA |
| | | sequence | CTGAAAATCAGCAGGGTGGAGGCTGAGGATATTGGGATTTATTACTGCATGCAAGGTACACACTGGCCGCTCACTTT |
| | | | CGGCGGAGGGACCAAGGTGGAGCTCAAA |
| 218 | IMPI-053 | VL domain | DVVMTQSPVSLPVTLGQPASISCRSSQSLIYSDGNTYLSWFQQRPGQSPRRLIYKVSNWDSGVPDRFSGSGSGTDFT |
| | | amino acid | LKISRVEAEDIGIYYCMQGTHWPLTFGGGTKVELK |
| | | sequence | |
| 219 | IMPI-053 | LCDR1 | QSLIYSDGNTY |
| 85 | IMPI-053 | LCDR2 | KVS |
| 86 | IMPI-053 | LCDR3 | MQGTHWPLT |
| 220 | IMPI-021 | VH domain | GAGGTGCAGCTGGTGGAGTCTGGAGGAGGCTTGATCCAGCCTGGGGGGTCCCTGAGACTCTCCTGTGCAGCCTCTGG |
| | | nucleic | GGTCACCGTCAGTAGCAACTACATGAGCTGGGTCCGCCAGGCTCCAGGGAAGGGGCTGGAGTGGGTCTCAGTTATTT |
| | | acid | ATAGCGGTGGTAGCACATTCTACGCAGACTCCGTGAAGGGCCGATTCACCATCTCCAGAGACAATTCCAAGAACACG |
| | | sequence | CTGTATCTTCAAATGAACAGCCTGAGAGCCGAGGACACGGCCGTGTATTACTGTGCGAGAGATCTCTCCTACTACGG |
| | | | TATGGACGTCTGGGGCCAAGGGACCACGGTCACCGTCTCCTCA |
| 221 | IMPI-021 | VH domain | EVQLVESGGGLIQPGGSLRLSCAASGVTVSSNYMSWVRQAPGKGLEWVSVIYSGGSTFYADSVKGRFTISRDNSKNT |
| | | amino acid | LYLQMNSLRAEDTAVYYCARDLSYYGMDVWGQGTTVTVSS |
| | | sequence | |
| 3 | IMPI-021 | HCDR1 | GVTVSSNY |
| 14 | IMPI-021 | HCDR2 | IYSGGST |
| 222 | IMPI-021 | HCDR3 | ARDLSYYGMDV |
| 223 | IMPI-021 | VL domain | GACATCCAGTTGACCCAGTCTCCATCCTTCCTGTCTGCATCTGTAGGAGACAGAGTCACCATCACTTGCTGGGCCAG |
| | | nucleic | TCAGGGCATTAGCAGTTATTTAGCCTGGTATCAGCAAAAACCAGGGAAAGCCCCTAAGCTCCTGATCTATGCTGCAT |
| | | acid | CCACTTTGCAAAGTGGGGTCCCATCAAAATTCAGCGGCAGTGGATCTGGGACAGAATTCACTCTCACAATCAGCAGC |
| | | sequence | CTGCAGCCTGAAGATTTTGCAACTTATTACTGTCAACAGCTTAATAGTTACCCGTGCAGTTTTGGCCAGGGGACCAA |
| | | | GCTGGAGATCAAA |
| 224 | IMPI-021 | VL domain | DIQLTQSPSFLSASVGDRVTITCWASQGISSYLAWYQQKPGKAPKLLIYAASTLQSGVPSKFSGSGSGTEFTLTISS |
| | | amino acid | LQPEDFATYYCQQLNSYPCSFGQGTKLEIK |
| | | sequence | |
| 8 | IMPI-021 | LCDR1 | QGISSY |
| 18 | IMPI-021 | LCDR2 | AAS |
| 225 | IMPI-021 | LCDR3 | QQLNSYPCS |
| 226 | IMPI-032 | VH domain | CAGGTGCAGCTGCAGGAGTCGGGCCCAGGACTGGTGAAGCCTTCGGGGACCCTGTCCCTCACCTGCGCTGTCTCTGG |
| | | nucleic | TGGCTCCATCAGCAGTAATAAGTGGTGGAGTTGGGTCCGCCAGCCCCCAGGGAAGGGTCTGGAGTGGATTGGGGAAA |
| | | acid | TCGATCATAGTGGGAGCACCATGTACAACCCGTCCCTCAAGAGCCGAGTCACCATATCAGTAGACAAGTCCAAGAAC |
| | | sequence | CAGTTCTCCCTGAAGCTGAACTCTGTGACCGCCGCGGACACGGCCGTGTATTACTGTACGGGAGAGGGGTATAACTG |
| | | | GAACTACTGGGGCCAGGGGACCCGGGTCACCGTCTCCTCA |
| 227 | IMPI-032 | VH domain | QVQLQESGPGLVKPSGTLSLTCAVSGGSISSNKWWSWVRQPPGKGLEWIGEIDHSGSTMYNPSLKSRVTISVDKSKN |
| | | amino acid | QFSLKLNSVTAADTAVYYCTGEGYNWNYWGQGTRVTVSS |
| | | sequence | |
| 228 | IMPI-032 | HCDR1 | GGSISSNKW |
| 132 | IMPI-032 | HCDR2 | IDHSGST |
| 133 | IMPI-032 | HCDR3 | TGEGYNWNY |
| 229 | IMPI-032 | VL domain | GATGTTGTGATGACTCAGTCTCCACTCTCCCTGCCCGTCACCCTTGGACAGACGGCCTCCATCTCCTGCAGGTCTAG |
| | | nucleic | TCAAAGCCTCCTATACACTGATGGAAATACCTACTTGAGTTGGTTTCAGCAGAGGCCAGGCCAATCTCCAAGGCGCC |
| | | acid | TAATTTATAAGGTTTCTAAGTGGGAATCTGGGGTCCCAGACAGATTCAGCGGCAGTGGGTCAGGCACTGATTTCACA |
| | | sequence | CTGAAAATCAGCAGGGTGGAGGCTGAAGATGTTGGGATTTATTACTGCATGCAAGGTACACACTGGCCGCTCACTTT |
| | | | CGGCGGAGGGACCAAGGTGGAGATCAAA |
| 230 | IMPI-032 | VL domain | DVVMTQSPLSLPVTLGQTASISCRSSQSLLYTDGNTYLSWFQQRPGQSPRRLIYKVSKWESGVPDRFSGSGSGTDFT |
| | | amino acid | LKISRVEAEDVGIYYCMQGTHWPLTFGGGTKVEIK |
| | | sequence | |
| 136 | IMPI-032 | LCDR1 | QSLLYTDGNTY |
| 85 | IMPI-032 | LCDR2 | KVS |
| 86 | IMPI-032 | LCDR3 | MQGTHWPLT |
| 226 | IMPI-001 | VH domain | CAGGTGCAGCTGCAGGAGTCGGGCCCAGGACTGGTGAAGCCTTCGGGGACCCTGTCCCTCACCTGCGCTGTCTCTGG |
| | | nucleic | TGGCTCCATCAGCAGTAATAAGTGGTGGAGTTGGGTCCGCCAGCCCCCAGGGAAGGGTCTGGAGTGGATTGGGGAAA |
| | | acid | TCGATCATAGTGGGAGCACCATGTACAACCCGTCCCTCAAGAGCCGAGTCACCATATCAGTAGACAAGTCCAAGAAC |
| | | sequence | CAGTTCTCCCTGAAGCTGAACTCTGTGACCGCCGCGGACACGGCCGTGTATTACTGTACGGGAGAGGGGTATAACTG |
| | | | GAACTACTGGGGCCAGGGGACCCGGGTCACCGTCTCCTCA |
| 227 | IMPI-001 | VH domain | QVQLQESGPGLVKPSGTLSLTCAVSGGSISSNKWWSWVRQPPGKGLEWIGEIDHSGSTMYNPSLKSRVTISVDKSKN |
| | | amino acid | QFSLKLNSVTAADTAVYYCTGEGYNWNYWGQGTRVTVSS |
| | | sequence | |
| 228 | IMPI-001 | HCDR1 | GGSISSNKW |
| 132 | IMPI-001 | HCDR2 | IDHSGST |
| 133 | IMPI-001 | HCDR3 | TGEGYNWNY |
| 231 | IMPI-001 | VL domain | GATGTTGTGCTGACTCAGTCTCCACTCTCCCTGCCCGTCACCCTTGGACAGACGGCCTCCATCTCCTGCAGGTCTAG |
| | | nucleic | TCAAAGCCTCGTATACACTGATGGAAATACCTACTTGAGTTGGTTTCAGCAGAGGCCAGGCCAATCTCCAAGGCGCC |
| | | acid | TAATTTATAAGGTTTCTAAGTGGGAATCTGGGGTCCCAGACAGATTCAGCGGCAGTGGGTCAGGCACTGATTTCACC |
| | | sequence | CTGAAAATCAGCAGGGTGGAGGCTGAAGATGTTGGGATTTATTACTGCATGCAAGGTACACACTGGCCGCTCACTTT |
| | | | CGGCGGAGGGACCATGGTGGAGATCACA |
| 232 | IMPI-001 | VL domain | DVVLTQSPLSLPVTLGQTASISCRSSQSLVYTDGNTYLSWFQQRPGQSPRRLIYKVSKWESGVPDRFSGSGSGTDFT |
| | | amino acid | LKISRVEAEDVGIYYCMQGTHWPLTFGGGTMVEIT |
| | | sequence | |
| 144 | IMPI-001 | LCDR1 | QSLVYTDGNTY |
| 85 | IMPI-001 | LCDR2 | KVS |
| 86 | IMPI-001 | LCDR3 | MQGTHWPLT |
| 233 | IMPI-041 | VH domain | CAGGTGCAGCTGGTGCAGTCTGGGGCTGAGGTGAAGAAGCCTGGGGCCTCAGTGAAGGTCTCCTGCAAGGCTTCTGG |
| | | nucleic | ATACACCTTCACCAGTTATGATATCAACTGGGTGCGACAGGCCACTGGACAAGGGCTTGAGTGGATGGGATGGATGA |
| | | acid | ACCCTAACAGTGGTAACACAGGCTATGCACAGAAGTTCCAGGGCAGAGTCACCATGACCAGAAACACCTCCATAAGC |
| | | sequence | ACAGCCTACATGGAGCTGAGCAGCCTGAGATCTGAGGACACGGCCGTGTATTTCTGTGCGAGAGGCGGGCGATATTG |
| | | | TAGTGATGTTAGCTGCTACTCCGGAGAGCCTTTTGACTACTGGGGCCAGGGAACCCTGGTCACCGTCTCCTCA |
| 234 | IMPI-041 | VH domain | QVQLVQSGAEVKKPGASVKVSCKASGYTFTSYDINWVRQATGQGLEWMGWMNPNSGNTGYAQKFQGRVTMTRNTSIS |
| | | amino acid | TAYMELSSLRSEDTAVYFCARGGRYCSDVSCYSGEPFDYWGQGTLVTVSS |
| | | sequence | |
| 121 | IMPI-041 | HCDR1 | GYTFTSYD |
| 235 | IMPI-041 | HCDR2 | MNPNSGNT |
| 236 | IMPI-041 | HCDR3 | ARGGRYCSDVSCYSGEPFDY |
| 237 | IMPI-041 | VL domain | GAAATTGTGCTGACTCAGTCTCCAGACTTTCAGTCTGTGACTCCAAAGGAGAAAGTCACCATCACCTGCCGGGCCAG |
| | | nucleic | TCAGAGCATTGGTAGTAGCTTACACTGGTTCCAGCAGAAACCAGATCAGTCTCCAAAGCTCCTCATCAAGTATACTT |
| | | acid | CCCAGTCCATCTCAGGGGTCCCCTCGAGGTTCAGTGGCAGTGGATCTGGGACAGATTTCACCCTCACCATCAATAGC |
| | | sequence | CTGGAAGCTGAAGATGCTGCAGCGTATTATTGTCATCAGAGTAGTAGTTTACCTCACACTTTCGGCCCTGGGACCAA |
| | | | AGTGGAGATCAAA |
| 238 | IMPI-041 | VL domain | EIVLTQSPDFQSVTPKEKVTITCRASQSIGSSLHWFQQKPDQSPKLLIKYTSQSISGVPSRFSGSGSGTDFTLTINS |
| | | amino acid | LEAEDAAAYYCHQSSSLPHTFGPGTKVEIK |
| | | sequence | |
| 126 | IMPI-041 | LCDR1 | QSIGSS |
| 239 | IMPI-041 | LCDR2 | YTS |
| 128 | IMPI-041 | LCDR3 | HQSSSLPHT |
| 240 | IMPI-029 | VH domain | GAGGTGCAGCTGGTGGAGTCTGGAGGAGGCTTGATCCAGCCTGGGGGGTCCCTGAGACTCTCCTGTGCAGCCTCTGG |
| | | nucleic | GGTCACCGTCAGTAGCAACTATATGAACTGGGTCCGCCAGGCTCCAGGGAAGGGGCTGGAGTGGGTCTCAGTTATTT |
| | | acid | ATAGCGGTGGTAGCACATACTACGCAGACTCCGTGAAGGGCCGATTCACCATCTCCAGAGACAATTCCAAGAACACG |
| | | sequence | CTGTTTCTTCAAATGAACAGCCTGAGAGCCGAGGACTCGGCCGTGTATTACTGTGCGAGAGATTTGGGACCCTACGG |
| | | | TGTGGACGTCTGGGGCCAAGGGACCACGGTCACCGTCTCCTCA |
| 241 | IMPI-029 | VH domain | EVQLVESGGGLIQPGGSLRLSCAASGVTVSSNYMNWVRQAPGKGLEWVSVIYSGGSTYYADSVKGRFTISRDNSKNT |
| | | amino acid | LFLQMNSLRAEDSAVYYCARDLGPYGVDVWGQGTTVTVSS |
| | | sequence | |
| 3 | IMPI-029 | HCDR1 | GVTVSSNY |
| 14 | IMPI-029 | HCDR2 | IYSGGST |
| 106 | IMPI-029 | HCDR3 | ARDLGPYGVDV |
| 107 | IMPI-029 | VL domain | GACATCCAGTTGACCCAGTCTCCATCCTTCCTGTCTGCATCTGTAGGAGACAGAGTCACCATCACTTGCTGGGCCAG |
| | | nucleic | TCAGGGCATTAGCAGTTATTTAGCCTGGTATCAGCAAAAACCAGGGAAAGCCCCTAAGCTCCTGATCTATGCTGCAT |
| | | acid | CCACTTTGCAAAGTGGGGTCCCATCAAGGTTCAGCGGCAGTGGATCTGGGACAGAATTCACTCTCACAATCAGCAGC |
| | | sequence | CTGCAGCCTGAAGATTTTGCAACTTATTACTGTCAAGAGCTTAATAGTTACCCTCTCACCTTCGGCCAAGGGACACG |
| | | | ACTGGAGATTAAA |
| 108 | IMPI-029 | VL domain | DIQLTQSPSFLSASVGDRVTITCWASQGISSYLAWYQQKPGKAPKLLIYAASTLQSGVPSRFSGSGSGTEFTLTISS |
| | | amino acid | LQPEDFATYYCQELNSYPLTFGQGTRLEIK |
| | | sequence | |
| 8 | IMPI-029 | LCDR1 | QGISSY |
| 18 | IMPI-029 | LCDR2 | AAS |
| 109 | IMPI-029 | LCDR3 | QELNSYPLT |
| 242 | IMPI-009 | VH domain | GAGGTGCAGCTGGTGCAGTCTGGAGTAGAGGTGAAAAAGCCCGGGGAGTCTCTGAAGATCTCCTGTAAGGGTTCTGG |
| | | nucleic | ATACAGCTTTACCAGCTACTGGATCGGCTGGGTGCGCCAGATGCCCGGGAAAGGCCTGGAGTGGATGGGGATCATCT |
| | | acid | ATCCTGGTGACTCTGATACCAGATACAGCCCGTCCTTCCAAGGCCAGGTCACCATCTCAGCCGACAAGTCCATCAGT |
| | | sequence | ACCGCCTACCTGCAGTGGAGCAGCCTGAAGGCCTCGGACACCGCCATGTATTACTGTGCGAGGTCGTATAACTGGAA |
| | | | CTACTTTGACTACTGGGGCCAGGGAACCCTGGTCACCGTCTCCTCA |
| 243 | IMPI-009 | VH domain | EVQLVQSGVEVKKPGESLKISCKGSGYSFTSYWIGWVRQMPGKGLEWMGIIYPGDSDTRYSPSFQGQVTISADKSIS |
| | | amino acid | TAYLQWSSLKASDTAMYYCARSYNWNYFDYWGQGTLVTVSS |
| | | sequence | |
| 32 | IMPI-009 | HCDR1 | GYSFTSYW |
| 33 | IMPI-009 | HCDR2 | IYPGDSDT |
| 34 | IMPI-009 | HCDR3 | ARSYNWNYFDY |
| 244 | IMPI-009 | VL domain | GCCATCCAGTTGACCCAGTCTCCATCCTCCCTGTCTGCATCTGTAGGAGACAGAGTCACCATCACTTGCCGGGCAAG |
| | | nucleic | TCAGGGCATTAGCAGTGGTTTAGCCTGGTATCAGCAGAAACCAGGGAAAGCTCCTGAGCTCCTGATCTATGATGCCT |
| | | acid | CCAGTTTGGAAAGTGGGGTCCCATCAAGGTTCAGCGGCAGTGGATCTGGGACAGATTTCACTCTCACCATCAGCAGC |
| | | sequence | CTGCAGCCTGAAGATTTTGCAACTTATTACTGTCAACAGTTTTATAGTTACCCTTGGACGTTCGGCCAAGGGACCAA |
| | | | GGTGGAAATCAAA |
| 245 | IMPI-009 | VL domain | AIQLTQSPSSLSASVGDRVTITCRASQGISSGLAWYQQKPGKAPELLIYDASSLESGVPSRFSGSGSGTDFTLTISS |
| | | amino acid | LQPEDFATYYCQQFYSYPWTFGQGTKVEIK |
| | | sequence | |
| 92 | IMPI-009 | LCDR1 | QGISSG |
| 28 | IMPI-009 | LCDR2 | DAS |
| 246 | IMPI-009 | LCDR3 | QQFYSYPWT |
| 247 | IMPI-006 | VH domain | CAGCTGCAGCTGCAGGAGTCGGGCCCAGGACTGGTGAAGCCTTCGGAGACCCTGTCCCTCACCTGCACTGTCTCTGG |
| | | nucleic | TGGCTCCATCAGTAATAGTAATTACTACTGGGGCTGGATCCGCCAGCCCCCAGGGAAGGGGCTGGAGTGGATTGGGA |
| | | acid | GTATCTATTATAGTGGGAGAACCTACTACAACCCGTCCCTCAAGAGTCGAGTCACCATATCCGTAGACACGTCCAAG |
| | | sequence | AACCAGTTCTCCCTGAAGTTGAGCTCTGTGACCGCCGCAGACACGGCTGTGTATTACTGTGCGAGAATGGGATTACT |
| | | | ATGGTTCGGGGAGTTCTACGGTATGGACGTCTGGGGCCAAGGGACCACGGTCACCGTCTCCTCA |
| 248 | IMPI-006 | VH domain | QLQLQESGPGLVKPSETLSLTCTVSGGSISNSNYYWGWIRQPPGKGLEWIGSIYYSGRTYYNPSLKSRVTISVDTSK |
| | | amino acid | NQFSLKLSSVTAADTAVYYCARMGLLWFGEFYGMDVWGQGTTVTVSS |
| | | sequence | |
| 249 | IMPI-006 | HCDR1 | GGSISNSNYY |
| 250 | IMPI-006 | HCDR2 | IYYSGRT |
| 251 | IMPI-006 | HCDR3 | ARMGLLWFGEFYGMDV |
| 252 | IMPI-006 | VL domain | GACATCCAGATGACCCAGTCTCCATCCTCACTGTCTGCATCTGTAGGAGACAGAGTCACCATCACTTGTCGGGCGAG |
| | | nucleic | TCAGGGTATTAGCAGCTGGTTAGCCTGGTATCAGCAGAAACCAGAGAAAGCCCCTAAGTCCCTGATCTATGATGCAT |
| | | acid | CCAGTTTACAAAGAGGGGTCCCATCAAGGTTCAGCGGCAGTGGATCTGGGACAGATTTCACTCTCACCATCAGCAGC |
| | | sequence | CTGCAGCCTGAAGATTTTGCATCTTATTACTGCCAACAGTATAATAGTTACCCGCTCACTTTCGGCGGAGGGACCAG |
| | | | GGTGGAGATCAAA |
| 253 | IMPI-006 | VL domain | DIQMTQSPSSLSASVGDRVTITCRASQGISSWLAWYQQKPEKAPKSLIYDASSLQRGVPSRFSGSGSGTDFTLTISS |
| | | amino acid | LQPEDFASYYCQQYNSYPLTFGGGTRVEIK |
| | | sequence | |
| 254 | IMPI-006 | LCDR1 | QGISSW |
| 28 | IMPI-006 | LCDR2 | DAS |
| 255 | IMPI-006 | LCDR3 | QQYNSYPLT |
| 256 | IMPI-054 | VH domain | GAGGTGCAACTGGTGGAGTCTGGAGGAGGCTTGATCCAGCCTGGGGGGTCCCTGAGACTCTCCTGTGCAGCCTCTGG |
| | | nucleic | GCTCACCGTCAGTAGCAACTACATGAGCTGGGTCCGCCAGGCTCCAGGGAAGGGGCTGGAGTGGGTCTCAATTATTT |
| | | acid | ATAGCGGTGGTAGCACATACTACGCAGACTCCGTGAAGGGCCGATTCACCATCTCCAGAGACAATTCCAAGAACACG |
| | | sequence | CTGTATCTTCAAATGAACAGCCTGAGAGCCGAGGACACGGCCGTGTATTACTGTGCGAGGCTAGGGGGGTACTACTA |
| | | | CTACGGTATGGACGTCTGGGGCCAAGGGACCACGGTCACCGTCTCCTCA |
| 257 | IMPI-054 | VH domain | EVQLVESGGGLIQPGGSLRLSCAASGLTVSSNYMSWVRQAPGKGLEWVSIIYSGGSTYYADSVKGRFTISRDNSKNT |
| | | amino acid | LYLQMNSLRAEDTAVYYCARLGGYYYYGMDVWGQGTTVTVSS |
| | | sequence | |
| 172 | IMPI-054 | HCDR1 | GLTVSSNY |
| 14 | IMPI-054 | HCDR2 | IYSGGST |
| 258 | IMPI-054 | HCDR3 | ARLGGYYYYGMDV |
| 259 | IMPI-054 | VL domain | GACATCCAGATGACCCAGTCTCCATCCTCCCTGTCTGCATCTGTAGGAGAAAGAGTCACCATCACTTGCCAGGCGAG |
| | | nucleic | TCAGGACATTAGAAACTATTTAAATTGGTATCAGAAGAAACCAGGGAAAGCCCCTAAGCTCCTGATCTACGATTCAT |
| | | acid | CCAATTTGGAAACAGGGGTCCCATCAAGGTTCAGTGGAAGTGGATCTGGGACAGATTTTACTTTCACCATCAGCAGC |
| | | sequence | CTGCAGCCTGAAGATATTGCAACATATTACTGTCAACAGTATGATAATCTCCCGATCACCTTCGGCCAAGGGACACG |
| | | | ACTGGAGATTAAA |
| 260 | IMPI-054 | VL domain | DIQMTQSPSSLSASVGERVTITCQASQDIRNYLNWYQKKPGKAPKLLIYDSSNLETGVPSRFSGSGSGTDFTFTISS |
| | | amino acid | LQPEDIATYYCQQYDNLPITFGQGTRLEIK |
| | | sequence | |
| 261 | IMPI-054 | LCDR1 | QDIRNY |
| 262 | IMPI-054 | LCDR2 | DSS |
| 263 | IMPI-054 | LCDR3 | QQYDNLPIT |
| 264 | IMPI-044 | VH domain | GAGGTGCAGCTGGTGCAGTCTGGAGCAGAGGTGAAAAAGCCCGGGGAGTCTCTGAAGATCTCCTGTAAGGGTTCTGG |
| | | nucleic | ATACAGCTTTACCAGCTACTGGATCGGCTGGGTGCGCCAGATGCCCGGGAAAGGCCTGGAGTGGATGGGGATCATCT |
| | | acid | ATCCTGGTGACTCTGATACCAGATACAGCCCGTCCTTCCAAGGCCAGGTCACCATCTCAGCCGACAAGTCCATCAGC |
| | | sequence | ACCGCCTACCTGCAGTGGAGCAGCCTGAAGGCCTCGGACACCGCCATGTATTACTGTGCGAGGTCGTATAACTGGAA |
| | | | CTACTTTGACTACTGGGGCCAGGGAACCCTGGTCACCGTCTCCTCA |
| 265 | IMPI-044 | VH domain | EVQLVQSGAEVKKPGESLKISCKGSGYSFTSYWIGWVRQMPGKGLEWMGIIYPGDSDTRYSPSFQGQVTISADKSIS |
| | | amino acid | TAYLQWSSLKASDTAMYYCARSYNWNYFDYWGQGTLVTVSS |
| | | sequence | |
| 32 | IMPI-044 | HCDR1 | GYSFTSYW |
| 33 | IMPI-044 | HCDR2 | IYPGDSDT |
| 34 | IMPI-044 | HCDR3 | ARSYNWNYFDY |
| 266 | IMPI-044 | VL domain | GCCATCCAGTTGACCCAGTCTCCATCCTCCCTGTCTGCATCTGTTGGAGACAGAGTCACCATCACTTGCCGGGCAAG |
| | | nucleic | TCAGGGCATTAGTAGTGGTTTAGCCTGGTATCAGCAGAAACCAGGGAAAGCTCCTAAGCTCCTGATCTATGATGTCT |
| | | acid | CCAGTTTGGAAAGTGGGGTCCCATCAAGGTTCAGCGGCAGTGGATCTGGGACAGATTTCACTCTCACCATCAGCAGC |
| | | sequence | CTGCAGCCTGAAGATTTTGCAACTTATTACTGTCAACAGTTTCTTAGTTACCCTTGGACGTTCGGCCAAGGGACCAA |
| | | | GGTGGAAATCAAA |
| 267 | IMPI-044 | VL domain | AIQLTQSPSSLSASVGDRVTITCRASQGISSGLAWYQQKPGKAPKLLIYDVSSLESGVPSRFSGSGSGTDFTLTISS |
| | | amino acid | LQPEDFATYYCQQFLSYPWTFGQGTKVEIK |
| | | sequence | |
| 92 | IMPI-044 | LCDR1 | QGISSG |
| 203 | IMPI-044 | LCDR2 | DVS |
| 204 | IMPI-044 | LCDR3 | QQFLSYPWT |
| 268 | IMPI-002 | VH domain | GAGGTGCAGCTGGTGGAGTCTGGAGGAGGCTTGATCCAGCCTGGGGGGTCCCTGAGACTCTCCTGTGCAGCCTCTGG |
| | | nucleic | GGTCACCGTCAGTAGCAACTACATGAGCTGGGTCCGCCAGGCTCCAGGGAAGGGGCTGGAGGGGGTCTCAGTTATTT |
| | | acid | ATAGTGGTGGTAGCACATACTACGCAGACTCCGTGAAGGGCCGATTCACCATCTCCAGAGACAATTCCAAGAACACG |
| | | sequence | CTGTATCTTCAAATGAACAGCCTGAGAGCCGAGGACACGGCCGTGTATTACTGTGCGAGAGATACGGTGGTCTACGG |
| | | | TATGGACGTCTGGGGCCAAGGGACCACGGTCACCGTCTCCTCA |
| 269 | IMPI-002 | VH domain | EVQLVESGGGLIQPGGSLRLSCAASGVTVSSNYMSWVRQAPGKGLEGVSVIYSGGSTYYADSVKGRFTISRDNSKNT |
| | | amino acid | LYLQMNSLRAEDTAVYYCARDTVVYGMDVWGQGTTVTVSS |
| | | sequence | |
| 3 | IMPI-002 | HCDR1 | GVTVSSNY |
| 14 | IMPI-002 | HCDR2 | IYSGGST |
| 5 | IMPI-002 | HCDR3 | ARDTVVYGMDV |
| 270 | IMPI-002 | VL domain | GACATCCAGTTGACCCAGTCTCCATCCTTCCTGTCTGCATCTGTAGGAGACAGAGTCACCATCACTTGCTGGGCCAG |
| | | nucleic | TCAGGGCATTAGCAGTTATTTAGCCTGGTATCAGCAAAAACCAGGGAAAGCCCCTAAGCTCCTGATCTATGCTGCAT |
| | | acid | CCACTTTGCAAAGTGGGGTCCCATCAAGGTTCAGCGGCAGTGGATCTGGGACAGAATTCACTCTCACAATCAGCAGC |
| | | sequence | CTGCAGCCTGAAGATTTTGCAACTTATTACTGTCAACAGCTTAATAGTTACCCGCTCACTTTCGGCGGAGGGACCAA |
| | | | GGTGGAGATCAAA |
| 271 | IMPI-002 | VL domain | DIQLTQSPSFLSASVGDRVTITCWASQGISSYLAWYQQKPGKAPKLLIYAASTLQSGVPSRFSGSGSGTEFTLTISS |
| | | amino acid | LQPEDFATYYCQQLNSYPLTFGGGTKVEIK |
| | | sequence | |
| 8 | IMPI-002 | LCDR1 | QGISSY |
| 18 | IMPI-002 | LCDR2 | AAS |
| 10 | IMPI-002 | LCDR3 | QQLNSYPLT |
| 272 | IMPI-027 | VH domain | CAGGTGCAGCTGCAGGAGTCGGGCCCAGGACTGGTGAAGCCTTCACAGACCCTGTCCCTCACCTGCACTGTCTCTGG |
| | | nucleic | TGGCTCCATCAGCAGTTATGGTTACTACTGGAACTGGATCCGCCAGCACCCAGGGAAGGGCCTGGAGTGGATTGGGT |
| | | acid | ACATCTATTACAGTGGGAGCACCTACTACAACCCGTCCCTCAAGAGTCGAGTTACCATATCAGTAGACACGTCTAAG |
| | | sequence | AACCAGCTCTCCCTGAGGCTGAACTCTGTCAGTGCCGCGGACACGGCCGTGTATTACTGTGCGAGAGACTTCGGTGG |
| | | | TAACTCGAACTACTTTGACTACTGGGGCCAGGGAACCCTGGTCACCGTCTCCTCA |
| 273 | IMPI-027 | VH domain | QVQLQESGPGLVKPSQTLSLTCTVSGGSISSYGYYWNWIRQHPGKGLEWIGYIYYSGSTYYNPSLKSRVTISVDTSK |
| | | amino acid | NQLSLRLNSVSAADTAVYYCARDFGGNSNYFDYWGQGTLVTVSS |
| | | sequence | |
| 41 | IMPI-027 | HCDR1 | GGSISSYGYY |
| 42 | IMPI-027 | HCDR2 | IYYSGST |
| 43 | IMPI-027 | HCDR3 | ARDFGGNSNYFDY |
| 274 | IMPI-027 | VL domain | GCCATCCAGTTGACCCAGTCTCCATCCTCCCTGTCTGCATCTGTAGGAGACAGAGTCACCATCACTTGCCGGACAAG |
| | | nucleic | TCAGGGCATTAGCAGTGCTTTAGCCTGGTATCAACAGAAACCAGGGAAAGCTCCTAAACTCCTGATCTATGATGCCT |
| | | acid | CCAGTTTGGAAAGTGGGGTCCCATCAAGGTTCAGCGGCAGTGGATCTGGGACAGATTTCACTCTCACCATCAGCAGC |
| | | sequence | CTGCAGCCTGAAGATTTTGCAACTTATTACTGTCAACAGTTTAATAGTTACCCTCTCACTTTCGGCGGAGGGACCAA |
| | | | GGTGGAGATCAAA |
| 275 | IMPI-027 | VL domain | AIQLTQSPSSLSASVGDRVTITCRTSQGISSALAWYQQKPGKAPKLLIYDASSLESGVPSRFSGSGSGTDFTLTISS |
| | | amino acid | LQPEDFATYYCQQFNSYPLTFGGGTKVEIK |
| | | sequence | |
| 37 | IMPI-027 | LCDR1 | QGISSA |
| 28 | IMPI-027 | LCDR2 | DAS |
| 47 | IMPI-027 | LCDR3 | QQFNSYPLT |
| 264 | IMPI-011 | VH domain | GAGGTGCAGCTGGTGCAGTCTGGAGCAGAGGTGAAAAAGCCCGGGGAGTCTCTGAAGATCTCCTGTAAGGGTTCTGG |
| | | nucleic | ATACAGCTTTACCAGCTACTGGATCGGCTGGGTGCGCCAGATGCCCGGGAAAGGCCTGGAGTGGATGGGGATCATCT |
| | | acid | ATCCTGGTGACTCTGATACCAGATACAGCCCGTCCTTCCAAGGCCAGGTCACCATCTCAGCCGACAAGTCCATCAGC |
| | | sequence | ACCGCCTACCTGCAGTGGAGCAGCCTGAAGGCCTCGGACACCGCCATGTATTACTGTGCGAGGTCGTATAACTGGAA |
| | | | CTACTTTGACTACTGGGGCCAGGGAACCCTGGTCACCGTCTCCTCA |
| 265 | IMPI-011 | VH domain | EVQLVQSGAEVKKPGESLKISCKGSGYSFTSYWIGWVRQMPGKGLEWMGIIYPGDSDTRYSPSFQGQVTISADKSIS |
| | | amino acid | TAYLQWSSLKASDTAMYYCARSYNWNYFDYWGQGTLVTVSS |
| | | sequence | |
| 32 | IMPI-011 | HCDR1 | GYSFTSYW |
| 33 | IMPI-011 | HCDR2 | IYPGDSDT |
| 34 | IMPI-011 | HCDR3 | ARSYNWNYFDY |
| 276 | IMPI-011 | VL domain | GCCATCCAGTTGACCCAGTCTCCATCCTCCCTGTCTGCATCTGTAGGAGACAGAGTCACCATCACTTGCCGGGCAAG |
| | | nucleic | TCAGGGCATTAGCAGTGGTTTAGCCTGGTATCAGCAGAAACCAGGGAAAGCTCCTAAACTCCTGATCTATGATGCCT |
| | | acid | CCAGTTTGGAAAGTGGGGTCCCATCAAGGTTCAGCGGCAGTGGATCTGGGACAGATTTCACTCTCACCATCAGCAGC |
| | | sequence | CTGCAGCCTGAAGATTTTGCAATTTATTACTGTCAACAGTTTAATAGTTATCCTTGGACGTTCGGCCAAGGGACCAA |
| | | | GGTGGAAATCAAA |
| 277 | IMPI-011 | VL domain | AIQLTQSPSSLSASVGDRVTITCRASQGISSGLAWYQQKPGKAPKLLIYDASSLESGVPSRFSGSGSGTDFTLTISS |
| | | amino acid | LQPEDFAIYYCQQFNSYPWTFGQGTKVEIK |
| | | sequence | |
| 92 | IMPI-011 | LCDR1 | QGISSG |
| 28 | IMPI-011 | LCDR2 | DAS |
| 76 | IMPI-011 | LCDR3 | QQFNSYPWT |
| 278 | IMPI-033 | VH domain | CAGGTGCAGCTGCAGGAGTCGGGCCCAGGACTGGTGAAGCCTTCACAGACCCTGTCCCTCACCTGCACTGTCTCTGG |
| | | nucleic | TGGCTCCATCAGCAGTTATGGTTACTACTGGAGCTGGATCCGCCAGCACCCAGGGAAGGGCCTGGAGTGGATTGGAT |
| | | acid | ACATCTATTACAGTGGGAGCACCTACTACAACCCGTCCCTCAAGAGTCGAGTTACCATGTCAGTTGACACGTCTAAG |
| | | sequence | AACCAGCTCTCCCTGAGGCTGAACTCTGTCAGTGCCGCGGACACGGCCGTGTATTACTGTGCGAGAGACTTCGGTGG |
| | | | TAACTCGAACTACTTTGACTACTGGGGCCAGGGAACCCTGGTCACCGTCTCCTCA |
| 279 | IMPI-033 | VH domain | QVQLQESGPGLVKPSQTLSLTCTVSGGSISSYGYYWSWIRQHPGKGLEWIGYIYYSGSTYYNPSLKSRVTMSVDTSK |
| | | amino acid | NQLSLRLNSVSAADTAVYYCARDFGGNSNYFDYWGQGTLVTVSS |
| | | sequence | |
| 41 | IMPI-033 | HCDR1 | GGSISSYGYY |
| 42 | IMPI-033 | HCDR2 | IYYSGST |
| 43 | IMPI-033 | HCDR3 | ARDFGGNSNYFDY |
| 280 | IMPI-033 | VL domain | GCCATCCAGTTGACCCAGTCTCCATCCTCCCTGTCTGCATCTGTAGGAGACAGAGTCACCATCACTTGCCGGGCAAG |
| | | nucleic | TCAGGGCATTAGCAGTGCTTTAGCCTGGTATCAGCAGAAACCAGGGAAAGCTCCTAACCTCCTGATCTATGATGCCT |
| | | acid | CCAGTTTGGAAAGTGGGGTCCCATCAAGGTTCAGCGGCAGTGGATCTGGGACAGATTTCACTCTCACCATCAGCAGC |
| | | sequence | CTGCAGCCTGAAGATTTTGCAACTTATTACTGTCAACAGTTTAATAGTTCCCCTCTCACTTTCGGCGGAGGGACCAA |
| | | | GGTGGAGATCAAA |
| 281 | IMPI-033 | VL domain | AIQLTQSPSSLSASVGDRVTITCRASQGISSALAWYQQKPGKAPNLLIYDASSLESGVPSRFSGSGSGTDFTLTISS |
| | | amino acid | LQPEDFATYYCQQFNSSPLTFGGGTKVEIK |
| | | sequence | |
| 37 | IMPI-033 | LCDR1 | QGISSA |
| 28 | IMPI-033 | LCDR2 | DAS |
| 282 | IMPI-033 | LCDR3 | QQFNSSPLT |
| 283 | IMPI-055 | VH domain | CAGGTGCAGCTGGTGCAGTCTGGGGCTGAGGTGAAGAAGCCTGGGGCCTCAGTGAAGGTCTCCTGCAAGGCTTCTGG |
| | | nucleic | ATACACCTTCACCAGTTATGATATCAACTGGGTGCGACAGGCCACTGGACAAGGGCTTGAGTGGATGGGATGGATGA |
| | | acid | ACCCTAACAGTGGTAACACAGGCTATGCACAGAAGTTCCAGGGCAGAGTCACCATGACCAGAGACACCTCCATAAAC |
| | | sequence | ACAGCCTACATGGAGCTGAGCAGCCTGAGATCTGAGGACACGGCCGTGTATTTCTGTGCGAGAGGCGGGCGATATTG |
| | | | TAGTGATGTTACCTGCTACTCCGGAGAGCCTTTTGACTACTGGGGCCAGGGAACCCTGGTCACCGTCTCCTCA |
| 284 | IMPI-055 | VH domain | QVQLVQSGAEVKKPGASVKVSCKASGYTFTSYDINWVRQATGQGLEWMGWMNPNSGNTGYAQKFQGRVTMTRDTSIN |
| | | amino acid | TAYMELSSLRSEDTAVYFCARGGRYCSDVTCYSGEPFDYWGQGTLVTVSS |
| | | sequence | |
| 121 | IMPI-055 | HCDR1 | GYTFTSYD |
| 235 | IMPI-055 | HCDR2 | MNPNSGNT |
| 285 | IMPI-055 | HCDR3 | ARGGRYCSDVTCYSGEPFDY |
| 286 | IMPI-055 | VL domain | GAAATTATGCTGACTCAGTCTCCAGACTTTCAGTCTGTGACTCCAAAGGAGAAAGTCACCATCACCTGCCGGGCCAG |
| | | nucleic | TCAGAGCATTGGTAGTAGCTTACACTGGTACCAGCAGAAACCAGATCAGTCTCCAAAACTCCTCATCAAGTTTGCTT |
| | | acid | CCCAGTCCATCTCAGGGGTCCCCTCGAGGTTCAGTGGCAGTGGATCTGGGACAGATTTCACCCTCACCATCAATAGC |
| | | sequence | CTGGAAGCTGAAGATGCTGCAGCGTATTATTGTCATCAGAGTAGTAGTTTACCTCACACTTTCGGCCCTGGGACCAA |
| | | | AGTGGAGATCAAA |
| 287 | IMPI-055 | VL domain | EIMLTQSPDFQSVTPKEKVTITCRASQSIGSSLHWYQQKPDQSPKLLIKFASQSISGVPSRFSGSGSGTDFTLTINS |
| | | amino acid | LEAEDAAAYYCHQSSSLPHTFGPGTKVEIK |
| | | sequence | |
| 126 | IMPI-055 | LCDR1 | QSIGSS |
| 288 | IMPI-055 | LCDR2 | FAS |
| 128 | IMPI-055 | LCDR3 | HQSSSLPHT |
| 198 | IMPI-049 | VH domain | GAGGTGCAGCTGGTGCAGTCTGGAGCAGAGGTGAAAAAGCCCGGGGAGTCTCTGAAGATCTCCTGTAAGGGTTCTGG |
| | | nucleic | ATACAGCTTTACCAGCTACTGGATCGGCTGGGTGCGCCAGATGCCCGGGAAAGGCCTGGAGTGGATGGGGATCATCT |
| | | acid | ATCCTGGTGACTCTGATACCAGATACAGCCCGTCCTTCCAAGGCCAGGTCACCATCTCAGCCGACAAGTCCATCAGC |
| | | sequence | ACCGCCTACCTGCAGTGGAGCAGCCTGAAGGCCTCGGACACCGCCATGTATTACTGTGTGAGGTCGTATAATTGGAA |
| | | | CTACTTTGACTACTGGGGCCAGGGAACCCTGGTCACCGTCTCCTCA |
| 199 | IMPI-049 | VH domain | EVQLVQSGAEVKKPGESLKISCKGSGYSFTSYWIGWVRQMPGKGLEWMGIIYPGDSDTRYSPSFQGQVTISADKSIS |
| | | amino acid | TAYLQWSSLKASDTAMYYCVRSYNWNYFDYWGQGTLVTVSS |
| | | sequence | |
| 32 | IMPI-049 | HCDR1 | GYSFTSYW |
| 33 | IMPI-049 | HCDR2 | IYPGDSDT |
| 200 | IMPI-049 | HCDR3 | VRSYNWNYFDY |
| 289 | IMPI-049 | VL domain | GCCATCCAGTTGACCCAGTCTCCATCCTCCCTGTCTGCATCTGTAGGAGACAGAGTCACCATCACTTGCCGGGCAAG |
| | | nucleic | TCAGGGCATTAGCAGTGGTTTAGCCTGGTATCAGCAGAAACCAGGGAAAGCTCCTAAGCTCCTGATCTATGATGTCT |
| | | acid | CCAGTTTGGAAAGTGGGGTCCCATCAAGGTTCAGCGGCAGTGGATCTGGGACAGATTTCACTCTCACCATCAGCAGC |
| | | sequence | CTGCAGCCTGAAGATTTTGCAACTTATTACTGTCAACAGTTTCTTAGTTACCCTTGGACGTTCGGCCAAGGGACCAA |
| | | | GGTGGAAATCAAA |
| 267 | IMPI-049 | VL domain | AIQLTQSPSSLSASVGDRVTITCRASQGISSGLAWYQQKPGKAPKLLIYDVSSLESGVPSRFSGSGSGTDFTLTISS |
| | | amino acid | LQPEDFATYYCQQFLSYPWTFGQGTKVEIK |
| | | sequence | |
| 92 | IMPI-049 | LCDR1 | QGISSG |
| 203 | IMPI-049 | LCDR2 | DVS |
| 204 | IMPI-049 | LCDR3 | QQFLSYPWT |
| 290 | IMPI-042 | VH domain | GAGGTGCAACTGGTGGAGTCTGGAGGAGGCTTGATCCAGCCTGGGGGGTCCCTGAGACTCTCCTGTGCAGCCTCTGG |
| | | nucleic | GCTCACCGTCAGTAGCAACTACATGAGCTGGGTCCGCCAGGCTCCAGGGAAGGGGCTGGAGTGGGTCTCAATTATTT |
| | | acid | ATAGCGGTGGTAGCACATACTATGCAGACTCCGTGAAGGGCCGATTCACCATCTCCAGAGACAATTCCAAGAACACG |
| | | sequence | CTGTATCTTCAAATGAACAGCCTGAGAGCCGAGGACACGGCCGTGTATTACTGTGCGAGGCTAGGGGGGTACTACTA |
| | | | CTACGGTATGGACGTCTGGGGCCAAGGGACCACGGTCACCGTCTCCTCA |
| 257 | IMPI-042 | VH domain | EVQLVESGGGLIQPGGSLRLSCAASGLTVSSNYMSWVRQAPGKGLEWVSIIYSGGSTYYADSVKGRFTISRDNSKNT |
| | | amino acid | LYLQMNSLRAEDTAVYYCARLGGYYYYGMDVWGQGTTVTVSS |
| | | sequence | |
| 172 | IMPI-042 | HCDR1 | GLTVSSNY |
| 14 | IMPI-042 | HCDR2 | IYSGGST |
| 258 | IMPI-042 | HCDR3 | ARLGGYYYYGMDV |
| 291 | IMPI-042 | VL domain | GACATCCAGATGACCCAGTCTCCATCCTCCCTGTCTGCATCTGTAGGAGAAAGAGTCACCATCACTTGCCAGGCGAG |
| | | nucleic | TCAGGACATTAGAAACTATTTAAATTGGTATCAGAAGAAACCAGGGAAAGCCCCTAAACTCCTGATCTACGATTCAT |
| | | acid | CCAATTTGGAAACAGGGGTCCCATCAAGGTTCAGTGGAGGTGGATCTGGGACAGATTTTACTTTCACCATCAGCAGC |
| | | sequence | CTGCAGCCTGAAGATATTGCAACATATTACTGTCAACAGTATGATAATCTCCCGATCACCTTCGGCCAAGGGACACG |
| | | | ACTGGAGATTAAA |
| 292 | IMPI-042 | VL domain | DIQMTQSPSSLSASVGERVTITCQASQDIRNYLNWYQKKPGKAPKLLIYDSSNLETGVPSRFSGGGSGTDFTFTISS |
| | | amino acid | LQPEDIATYYCQQYDNLPITFGQGTRLEIK |
| | | sequence | |
| 261 | IMPI-042 | LCDR1 | QDIRNY |
| 262 | IMPI-042 | LCDR2 | DSS |
| 263 | IMPI-042 | LCDR3 | QQYDNLPIT |
| 293 | IMPI-035 | VH domain | GAAGTGCAGCTGGTGGAGTCTGGGGGAGACTTGGTACAGCCTGGCAGGTCCCTGAGACTCTCCTGTGCAGCCTCTGG |
| | | nucleic | ATTCACCTTTGATGATTATGCCATGCACTGGGTCCGGCAAGCTCCAGGGAAGGGCCTGGAGTGGGTCTCAGGTATTA |
| | | acid | GTTGGAATAGTGGTAGCATAGGCTATGCGGACTCTGTGAAGGGCCGATTCACCATCTCCAGAGACAACGCCAAGAAC |
| | | sequence | TCCCTGTATCTGCAAATGAACAGTCTGAGAGCTGAGGACACGGCCTTGTATTACTGTGCAAAAGATCTCCAGGGGGA |
| | | | CTACTACTACTACGGTGTGGACGTCTGGGGCCAAGGGACCACGGTCACCGTCTCCTCA |
| 294 | IMPI-035 | VH domain | EVQLVESGGDLVQPGRSLRLSCAASGFTFDDYAMHWVRQAPGKGLEWVSGISWNSGSIGYADSVKGRFTISRDNAKN |
| | | amino acid | SLYLQMNSLRAEDTALYYCAKDLQGDYYYYGVDVWGQGTTVTVSS |
| | | sequence | |
| 22 | IMPI-035 | HCDR1 | GFTFDDYA |
| 23 | IMPI-035 | HCDR2 | ISWNSGSI |
| 147 | IMPI-035 | HCDR3 | AKDLQGDYYYYGVDV |
| 295 | IMPI-035 | VL domain | GCCATCCAGTTGACCCAGTCTCCATCCTCCCTGTCTGCATCTGTAGGAGACAGAGTCACCATCACTTGCCGGGCAAG |
| | | nucleic | TCAGGGCATTAGCAGTGCTTTAGCCTGGTATCAGCAGAAATCAGGAAAAGCTCCTAAGCTCCTGATCTATGATGCCT |
| | | acid | CCAGTTTGGGAAGTGGGGTCCCATCAAGGTTCAGCGGCAGTAGATCTGGGACAGATTTCACTCTCACCATCAGCAGC |
| | | sequence | CTGCAACCTGAAGATTTTGCAACTTATTACTGTCAACAGTTTATTAGTTACCCGCTCACTTTCGGCGGAGGGACCAA |
| | | | GGTGGAGATCAAA |
| 296 | IMPI-035 | VL domain | AIQLTQSPSSLSASVGDRVTITCRASQGISSALAWYQQKSGKAPKLLIYDASSLGSGVPSRFSGSRSGTDFTLTISS |
| | | amino acid | LQPEDFATYYCQQFISYPLTFGGGTKVEIK |
| | | sequence | |
| 37 | IMPI-035 | LCDR1 | QGISSA |
| 28 | IMPI-035 | LCDR2 | DAS |
| 69 | IMPI-035 | LCDR3 | QQFISYPLT |
| 297 | IMPI-028 | VH domain | GAGGTGCAGCTGGTGGAGTCTGGAGGAGGCTTGATCCAGCCTGGGGGGTCCCTGAGACTCTCCTGTGCAGCCTCTGG |
| | | nucleic | GTTCACCGTCAGTAGCAACTACATGAGCTGGGTCCGCCAGGCTCCAGGGAAGGGGCTGGAGTGGGTCTCAGTTATTT |
| | | acid | ATAGCGGTGGTAGCACATACTACGCAGACTCCGTGAAGGGCCGATTCACCATCTCCAGAGACAATTCCAAGAACACG |
| | | sequence | CTGTATCTTCAAATGAACAGCCTGAGAGCCGAGGACACGGCCGTGTATTACTGTGCGAGAGACTACGGTGACCTATA |
| | | | CTTTGACTACTGGGGCCAGGGAACCCTGGTCACCGTCTCCTCA |
| 298 | IMPI-028 | VH domain | EVQLVESGGGLIQPGGSLRLSCAASGFTVSSNYMSWVRQAPGKGLEWVSVIYSGGSTYYADSVKGRFTISRDNSKNT |
| | | amino acid | LYLQMNSLRAEDTAVYYCARDYGDLYFDYWGQGTLVTVSS |
| | | sequence | |
| 13 | IMPI-028 | HCDR1 | GFTVSSNY |
| 14 | IMPI-028 | HCDR2 | IYSGGST |
| 299 | IMPI-028 | HCDR3 | ARDYGDLYFDY |
| 300 | IMPI-028 | VL domain | GAAATTGTGTTGACGCAGTCTCCAGGCACCCTGTCTTTGTCTCCAGGGGAAAGAGCCACCCTCTCCTGCAGGGCCAG |
| | | nucleic | TCAGAGTATTAGCAGCTACTTAGCCTGGTACCAGCAGAAACCTGGCCAGGCTCCCAGGCTCCTCATCTATGGTGCAT |
| | | acid | CCAGCAGGGCCACTGGCATCCCAGACAAATTCAGTGGCAGTGGGTCTGGGACAGACTTCACTCTCACCATCAGCAGA |
| | | sequence | CTGGAGCCTGAAGATTTTGCAGTGTATTACTGTCAGCAGTATGGTAGCTCACCTCGGACGTTCGGCCAAGGGACCAA |
| | | | GGTGGAAATCAAA |
| 301 | IMPI-028 | VL domain | EIVLTQSPGTLSLSPGERATLSCRASQSISSYLAWYQQKPGQAPRLLIYGASSRATGIPDKFSGSGSGTDFTLTISR |
| | | amino acid | LEPEDFAVYYCQQYGSSPRTFGQGTKVEIK |
| | | sequence | |
| 302 | IMPI-028 | LCDR1 | QSISSY |
| 157 | IMPI-028 | LCDR2 | GAS |
| 303 | IMPI-028 | LCDR3 | QQYGSSPRT |
| 304 | IMPI-018 | VH domain | CAGGTGCAGCTGCAGGAGTCGGGCCCAGGACTGGTGAAGCCTTCACAGACCCTGTCCCTCACCTGCACTGTCTCTGG |
| | | nucleic | TGACTCCATCAGCCGTGGTGGTTTCTACTGGAGCTGGATCCGCCAGCACCCAGGGAAGGGCCTGGAGTGGATTGGGT |
| | | acid | ACATCTATTACAGTGGGAGCACCTACTACAACCCGTCCCTCAAGGGTCGAGTTACCATATCAGTAGACACGTCTAAG |
| | | sequence | AACCAGTTCTCCCTGAAGCTGACCTCTGTGACTGCCGCGGACACGGCCGTGTATTACTGTGCGAGAGACTACGGTGG |
| | | | TAACTCGAACTACTTTGACTACTGGGGCCAGGGGACCCTGGTCACCGTCTCCTCA |
| 305 | IMPI-018 | VH domain | QVQLQESGPGLVKPSQTLSLTCTVSGDSISRGGFYWSWIRQHPGKGLEWIGYIYYSGSTYYNPSLKGRVTISVDTSK |
| | | amino acid | NQFSLKLTSVTAADTAVYYCARDYGGNSNYFDYWGQGTLVTVSS |
| | | sequence | |
| 306 | IMPI-018 | HCDR1 | GDSISRGGFY |
| 42 | IMPI-018 | HCDR2 | IYYSGST |
| 307 | IMPI-018 | HCDR3 | ARDYGGNSNYFDY |
| 308 | IMPI-018 | VL domain | GCCATCCAGTTGACCCAGTCTCCATCCTCCCTGTCTGCATCTGTAGGAGACAGAGTCACCATCACTTGCCGGGCAAG |
| | | nucleic | TCAGGGCATTAGCAGTGCTTTAGCCTGGTATCAGCAGAAACCAGGGAAAGCTCCTAAGCTCCTGATCTATGATGCCT |
| | | acid | CCAGTTTGGAAAGTGGGGTCCCATCAAGGTTCAGCGGCAGTGGATCTGGGACAGATTTCACTCTCACCATCAGCAGC |
| | | sequence | CTGCAGCCTGAAGATTTTGCACCTTATTACTGTCAACAGTTTAATAGTTACCCTCTCACTTTCGGCGGAGGGACCAA |
| | | | GGTGGAGATCAGG |
| 309 | IMPI-018 | VL domain | AIQLTQSPSSLSASVGDRVTITCRASQGISSALAWYQQKPGKAPKLLIYDASSLESGVPSRFSGSGSGTDFTLTISS |
| | | amino acid | LQPEDFAPYYCQQFNSYPLTFGGGTKVEIR |
| | | sequence | |
| 37 | IMPI-018 | LCDR1 | QGISSA |
| 28 | IMPI-018 | LCDR2 | DAS |
| 47 | IMPI-018 | LCDR3 | QQFNSYPLT |
| 264 | IMPI-050 | VH domain | GAGGTGCAGCTGGTGCAGTCTGGAGCAGAGGTGAAAAAGCCCGGGGAGTCTCTGAAGATCTCCTGTAAGGGTTCTGG |
| | | nucleic | ATACAGCTTTACCAGCTACTGGATCGGCTGGGTGCGCCAGATGCCCGGGAAAGGCCTGGAGTGGATGGGGATCATCT |
| | | acid | ATCCTGGTGACTCTGATACCAGATACAGCCCGTCCTTCCAAGGCCAGGTCACCATCTCAGCCGACAAGTCCATCAGC |
| | | sequence | ACCGCCTACCTGCAGTGGAGCAGCCTGAAGGCCTCGGACACCGCCATGTATTACTGTGCGAGGTCGTATAACTGGAA |
| | | | CTACTTTGACTACTGGGGCCAGGGAACCCTGGTCACCGTCTCCTCA |
| 265 | IMPI-050 | VH domain | EVQLVQSGAEVKKPGESLKISCKGSGYSFTSYWIGWVRQMPGKGLEWMGIIYPGDSDTRYSPSFQGQVTISADKSIS |
| | | amino acid | TAYLQWSSLKASDTAMYYCARSYNWNYFDYWGQGTLVTVSS |
| | | sequence | |
| 32 | IMPI-050 | HCDR1 | GYSFTSYW |
| 33 | IMPI-050 | HCDR2 | IYPGDSDT |
| 34 | IMPI-050 | HCDR3 | ARSYNWNYFDY |
| 310 | IMPI-050 | VL domain | GCCATCCAGTTGACCCAGTCTCCATCCTCCCTGTCTGCATCTGTAGGAGACAGAGTCACCATCACTTGCCGGGCAAG |
| | | nucleic | TCAGGGCATTAACAATGGTTTAGCCTGGTATCAGCAGAAACCAGGGAAAGCTCCTAAGCTCCTGATCTATGATGTCT |
| | | acid | CCAGTTTGGAAAGTGGGGTCCCATCAAGGTTCAGCGGCAGTGGATCTGGGAGAGATTCCACTCTCACCATCAGCAGT |
| | | sequence | CTGCAGTCTGAAGATTTTGCAACTTATTACTGTCAACAGTTTAAAAGTTACCCTTGGACGTTCGGCCAAGGGACCAA |
| | | | GGTGGAAATCAAA |
| 311 | IMPI-050 | VL domain | AIQLTQSPSSLSASVGDRVTITCRASQGINNGLAWYQQKPGKAPKLLIYDVSSLESGVPSRFSGSGSGRDSTLTISS |
| | | amino acid | LQSEDFATYYCQQFKSYPWTFGQGTKVEIK |
| | | sequence | |
| 312 | IMPI-050 | LCDR1 | QGINNG |
| 203 | IMPI-050 | LCDR2 | DVS |
| 93 | IMPI-050 | LCDR3 | QQFKSYPWT |
| 264 | IMPI-016 | VH domain | GAGGTGCAGCTGGTGCAGTCTGGAGCAGAGGTGAAAAAGCCCGGGGAGTCTCTGAAGATCTCCTGTAAGGGTTCTGG |
| | | nucleic | ATACAGCTTTACCAGCTACTGGATCGGCTGGGTGCGCCAGATGCCCGGGAAAGGCCTGGAGTGGATGGGGATCATCT |
| | | acid | ATCCTGGTGACTCTGATACCAGATACAGCCCGTCCTTCCAAGGCCAGGTCACCATCTCAGCCGACAAGTCCATCAGC |
| | | sequence | ACCGCCTACCTGCAGTGGAGCAGCCTGAAGGCCTCGGACACCGCCATGTATTACTGTGCGAGGTCGTATAACTGGAA |
| | | | CTACTTTGACTACTGGGGCCAGGGAACCCTGGTCACCGTCTCCTCA |
| 265 | IMPI-016 | VH domain | EVQLVQSGAEVKKPGESLKISCKGSGYSFTSYWIGWVRQMPGKGLEWMGIIYPGDSDTRYSPSFQGQVTISADKSIS |
| | | amino acid | TAYLQWSSLKASDTAMYYCARSYNWNYFDYWGQGTLVTVSS |
| | | sequence | |
| 32 | IMPI-016 | HCDR1 | GYSFTSYW |
| 33 | IMPI-016 | HCDR2 | IYPGDSDT |
| 34 | IMPI-016 | HCDR3 | ARSYNWNYFDY |
| 313 | IMPI-016 | VL domain | GCCATCCAGTTGACCCAGTCTCCATCCTCCCTGTCTGCATCTGTAGGAGACAGAGTCACCATCACTTGCCGGGCAAG |
| | | nucleic | TCAGGGCATTAGCAGTGGTTTAGCCTGGTATCAGCAGAAACCAGGGAAAGCTCCTAAGCTCCTGATCTATGATGCCT |
| | | acid | CCAGTTTGGAAAGTGGGGTCCCATCAAGGTTCAGCGGCAGTGGATCTGGGACAGATTTCACTCTCACCATCAGCAAC |
| | | sequence | CTGCAGCCTGAAGATTTTGCAACTTATTACTGTCAACAGTTTAATAGTTACCCTTGGACGTTCGGCCAAGGGACCAA |
| | | | GGTGGAAATCAAA |
| 314 | IMPI-016 | VL domain | AIQLTQSPSSLSASVGDRVTITCRASQGISSGLAWYQQKPGKAPKLLIYDASSLESGVPSRFSGSGSGTDFTLTISN |
| | | amino acid | LQPEDFATYYCQQFNSYPWTFGQGTKVEIK |
| | | sequence | |
| 92 | IMPI-016 | LCDR1 | QGISSG |
| 28 | IMPI-016 | LCDR2 | DAS |
| 76 | IMPI-016 | LCDR3 | QQFNSYPWT |
| 315 | IMPI-040 | VH domain | CAGGTGCAGCTACAGGAGTCGGGCCCAGGACTGGTGAAGCCTTCGGGGACCCTGTCCCTCACCTGCGCTGTCTCTGG |
| | | nucleic | TGGCTCCATCAGCAGTAATAACTGGTGGAGTTGGGTCCGCCAGCCCCCAGGGAAGGGTCTGGAGTGGATTGGGGAAA |
| | | acid | TCTATCATAGTGGGAGCACCATGTACAACCCGTCCCTCAAGAGTCGAGTCACCATATCAGTAGACAAGTCCAAGAAC |
| | | sequence | CAGTTCTCCCTGAAGCTGAACTCTGTGACCGCCGCGGACACGGCCGTGTATTACTGTACGGGAGAGGGGTCTAACTG |
| | | | GAACTACTGGGGCCAGGGGACCCTGGTCACCGTCTCCTCA |
| 316 | IMPI-040 | VH domain | QVQLQESGPGLVKPSGTLSLTCAVSGGSISSNNWWSWVRQPPGKGLEWIGEIYHSGSTMYNPSLKSRVTISVDKSKN |
| | | amino acid | QFSLKLNSVTAADTAVYYCTGEGSNWNYWGQGTLVTVSS |
| | | sequence | |
| 131 | IMPI-040 | HCDR1 | GGSISSNNW |
| 140 | IMPI-040 | HCDR2 | IYHSGST |
| 317 | IMPI-040 | HCDR3 | TGEGSNWNY |
| 318 | IMPI-040 | VL domain | GATGTTGTGATGACTCAGTCTCCACTCTCCCTGCCCGTCACCCTTGGACAGCCGGCCTCCATCTCCTGCAGGTCTAG |
| | | nucleic | TCAAAGCCTCGTATATACTGATGGAAACACCTACTTGAGTTGGTTTCAGCAGAGGCCAGGCCAATCTCCAAGGCGCC |
| | | acid | TACTTTATAAGGTTTCTAACTGGGACTCTGGGGTCCCAGACAGATTCAGCGGCAGTGGGTCAGGCACTGATTTCACA |
| | | sequence | CTGAAAATCAGCAGGGTGGAGGCTGAAGATGTTGGGATTTATTATTGCATGCAAGGTACACACTGGCCGCTCACTTT |
| | | | CGGCGGAGGGACCAAGGTGGAGATCAAA |
| 319 | IMPI-040 | VL domain | DVVMTQSPLSLPVTLGQPASISCRSSQSLVYTDGNTYLSWFQQRPGQSPRRLLYKVSNWDSGVPDRFSGSGSGTDFT |
| | | amino acid | LKISRVEAEDVGIYYCMQGTHWPLTFGGGTKVEIK |
| | | sequence | |
| 144 | IMPI-040 | LCDR1 | QSLVYTDGNTY |
| 85 | IMPI-040 | LCDR2 | KVS |
| 86 | IMPI-040 | LCDR3 | MQGTHWPLT |
| 77 | IMPI-030 | VH domain | CAGGTGCAGCTGCAGGAGTCGGGCCCAGGACTGGTGAAGCCTTCGGGGACCCTGTCCCTCACCTGCGCTGTCTCTGG |
| | | nucleic | TGGCTCCATCAGCAGGAGTACCTGGTGGAGTTGGGTCCGCCAGCCCCCAGGGAAGGGGCTGGAGTGGATTGGGGAAA |
| | | acid | TCTCTCATAGTGGGAGCACCCAGTACAACCCGTCCCTCAAGAGTCGAGTCACCATATCACTAGACAAGTCCAAGAAC |
| | | sequence | CAGTTCTCCCTGAAGCTGAACTCTGTGACCGCCGCGGACACGGCCGTATATTACTGTGCGGGAGAGGGGTATAACTG |
| | | | GAACTACTGGGGCCAGGGAACCCTGGTCACCGTCTCCTCA |
| 78 | IMPI-030 | VH domain | QVQLQESGPGLVKPSGTLSLTCAVSGGSISRSTWWSWVRQPPGKGLEWIGEISHSGSTQYNPSLKSRVTISLDKSKN |
| | | amino acid | QFSLKLNSVTAADTAVYYCAGEGYNWNYWGQGTLVTVSS |
| | | sequence | |
| 79 | IMPI-030 | HCDR1 | GGSISRSTW |
| 80 | IMPI-030 | HCDR2 | ISHSGST |
| 81 | IMPI-030 | HCDR3 | AGEGYNWNY |
| 320 | IMPI-030 | VL domain | GATGTTGTAATGACTCAGTCTCCACTCTCCCTGCCCGTCACCCTTGGACAGCCGGCCTCCATCTCCTGCAGGTCTAG |
| | | nucleic | TCAAAGCCTCGTATACAGTGATGGAAACACCTACTTGAGTTGGTTTCAGCAGAGGCCAGGCCAATCTCCAAGGCGCC |
| | | acid | TAATTTATAAGGTTTCTAAGTGGGACTCTGGGGTCCCAGACAGATTCAGCGGCAGTGGGTCAGGCACTGATTTCACA |
| | | sequence | CTGAAAATCAGCAGGGTGGAGGCTGAGGATGTTGGGGTTTATTACTGCATGCAAGGTACACACTGGCCGCTCACTTT |
| | | | CGGCGGAGGGACCAAGGTGGAGATCAAA |
| 321 | IMPI-030 | VL domain | DVVMTQSPLSLPVTLGQPASISCRSSQSLVYSDGNTYLSWFQQRPGQSPRRLIYKVSKWDSGVPDRFSGSGSGTDFT |
| | | amino acid | LKISRVEAEDVGVYYCMQGTHWPLTFGGGTKVEIK |
| | | sequence | |
| 84 | IMPI-030 | LCDR1 | QSLVYSDGNTY |
| 85 | IMPI-030 | LCDR2 | KVS |
| 86 | IMPI-030 | LCDR3 | MQGTHWPLT |
| 264 | IMPI-034 | VH domain | GAGGTGCAGCTGGTGCAGTCTGGAGCAGAGGTGAAAAAGCCCGGGGAGTCTCTGAAGATCTCCTGTAAGGGTTCTGG |
| | | nucleic | ATACAGCTTTACCAGCTACTGGATCGGCTGGGTGCGCCAGATGCCCGGGAAAGGCCTGGAGTGGATGGGGATCATCT |
| | | acid | ATCCTGGTGACTCTGATACCAGATACAGCCCGTCCTTCCAAGGCCAGGTCACCATCTCAGCCGACAAGTCCATCAGC |
| | | sequence | ACCGCCTACCTGCAGTGGAGCAGCCTGAAGGCCTCGGACACCGCCATGTATTACTGTGCGAGGTCGTATAACTGGAA |
| | | | CTACTTTGACTACTGGGGCCAGGGAACCCTGGTCACCGTCTCCTCA |
| 265 | IMPI-034 | VH domain | EVQLVQSGAEVKKPGESLKISCKGSGYSFTSYWIGWVRQMPGKGLEWMGIIYPGDSDTRYSPSFQGQVTISADKSIS |
| | | amino acid | TAYLQWSSLKASDTAMYYCARSYNWNYFDYWGQGTLVTVSS |
| | | sequence | |
| 32 | IMPI-034 | HCDR1 | GYSFTSYW |
| 33 | IMPI-034 | HCDR2 | IYPGDSDT |
| 34 | IMPI-034 | HCDR3 | ARSYNWNYFDY |
| 322 | IMPI-034 | VL domain | GCCATCCAGTTGACCCAGTCTCCATCCTCCCTGTCTGCATCTGTAGGAGACAGAGTCACCATCACTTGCCGGGCAAG |
| | | nucleic | TCAGGGCATTAACAGTGGTTTAGCCTGGTATCAGCAGAAACCAGGGAAAGGTCTTAAGCTCCTGATCTATGATGTCT |
| | | acid | CCAGTTTGGAAAGTGGGGTCCCATCAAGGTTCAGCGGCAGTGGATCTGGGAGAGATTTCACTCTCACCATCAGCAGC |
| | | sequence | CTGCAGCCTGAAGATTTTGCAACTTATTACTGTCAACAGTTTAAAAGTTACCCTTGGACGTTCGGCCAAGGGACCAA |
| | | | GGTGGAAATCAAA |
| 323 | IMPI-034 | VL domain | AIQLTQSPSSLSASVGDRVTITCRASQGINSGLAWYQQKPGKGLKLLIYDVSSLESGVPSRFSGSGSGRDFTLTISS |
| | | amino acid | LQPEDFATYYCQQFKSYPWTFGQGTKVEIK |
| | | sequence | |
| 324 | IMPI-034 | LCDR1 | QGINSG |
| 203 | IMPI-034 | LCDR2 | DVS |
| 93 | IMPI-034 | LCDR3 | QQFKSYPWT |
| 325 | IMPI-013 | VH domain | GAAGTGCAGCTGGTGGAGTCTGGGGGAGGCTTGGTACAGCCTGGCAGGTCCCTGAGACTCTCCTGTGCAGCCTCTGG |
| | | nucleic | ATTCACCTTTGATGATTATGCCATGCACTGGGTCCGGCAAACTCCAGGGAAGGGCCTGGAGTGGGTCTCAGGTATTA |
| | | acid | GTTGGAATAGTGGTAGCATAGGCTATGCGGACTCTGTGAAGGGCCGATTCACCATCTCCAGAGACAACGCCAAGAAC |
| | | sequence | TCCCTGTATCTGCAAATGAACAGTCTGAGAGCTGAAGACACGGCCTTATATTACTGTACAAAAGATTTGGGACTGGG |
| | | | GATTGGCTTCTACTACGGTTTGGACGTCTGGGGCCAGGGGACCACGGTCACCGTCTCCTCA |
| 326 | IMPI-013 | VH domain | EVQLVESGGGLVQPGRSLRLSCAASGFTFDDYAMHWVRQTPGKGLEWVSGISWNSGSIGYADSVKGRFTISRDNAKN |
| | | amino acid | SLYLQMNSLRAEDTALYYCTKDLGLGIGFYYGLDVWGQGTTVTVSS |
| | | sequence | |
| 22 | IMPI-013 | HCDR1 | GFTFDDYA |
| 23 | IMPI-013 | HCDR2 | ISWNSGSI |
| 327 | IMPI-013 | HCDR3 | TKDLGLGIGFYYGLDV |
| 328 | IMPI-013 | VL domain | GCCATCCAAATGACCCAGTCTCCATCCTCCCTGTCTACATCTGTAGGAGACAGAGTCACCATCACTTGCCGGGCAAG |
| | | nucleic | TCAGGGCATTAGAAATGATTTAGGCTGGTATCAGCTGAAGCCAGGGAAAGCCCCTAAGCTCCTGATCTATGATGCAT |
| | | acid | CCACTTTACAAAGTGGGGTCCCATCGAGGTTCAGCGGCAGTGGATCTGGCACAGATTTCACTCTCACCATCAGCAGC |
| | | sequence | CTGGAGCCTGAAGATTTAGCAACTTATTACTGTCTACATCACTACACTTACCCGTGGACGTTCGGCCATGGGACCAA |
| | | | GGTGGAACTCAAA |
| 329 | IMPI-013 | VL domain | AIQMTQSPSSLSTSVGDRVTITCRASQGIRNDLGWYQLKPGKAPKLLIYDASTLQSGVPSRFSGSGSGTDFTLTISS |
| | | amino acid | LEPEDLATYYCLHHYTYPWTFGHGTKVELK |
| | | sequence | |
| 27 | IMPI-013 | LCDR1 | QGIRND |
| 28 | IMPI-013 | LCDR2 | DAS |
| 29 | IMPI-013 | LCDR3 | LHHYTYPWT |
| 330 | IMPI-026 | VH domain | GAGGTGCAGCTGGTGCAGTCTGGAGCAGAGGTGAAAAAGCCCGGGGAGTCTCTGAAGATCTCCTGTAAGGGTTTTGG |
| | | nucleic | ATACAGCTTTACCAGCTACTGGATCGGCTGGGTGCGCCAGATGCCCGGGAAAGGCCTGGAGTGGATGGGGATCATCT |
| | | acid | ATCCTGGTGACTCTGATACCAGATACAGCCCGTCCTTCCAAGGCCAGGTCACCATCTCAGCCGACAAGTCCATCAGC |
| | | sequence | ACCGCCTACCTGCAGTGGAGCAGCCTGAAGGCCTCGGACACCGCCATGTATTACTGTGCGAGGTCGTATAACTGGAA |
| | | | CTACTTTGACTACTGGGGCCAGGGAACCCTGGTCACCGTCTCCTCA |
| 331 | IMPI-026 | VH domain | EVQLVQSGAEVKKPGESLKISCKGFGYSFTSYWIGWVRQMPGKGLEWMGIIYPGDSDTRYSPSFQGQVTISADKSIS |
| | | amino acid | TAYLQWSSLKASDTAMYYCARSYNWNYFDYWGQGTLVTVSS |
| | | sequence | |
| 32 | IMPI-026 | HCDR1 | GYSFTSYW |
| 33 | IMPI-026 | HCDR2 | IYPGDSDT |
| 34 | IMPI-026 | HCDR3 | ARSYNWNYFDY |
| 332 | IMPI-026 | VL domain | GCCATCCAGTTGACCCAGTCTCCATCCTCCCTGTCTGCATCTGTAGGAGACAGAGTCACCATCACTTGCCGGGCAAG |
| | | nucleic | TCAGGGCATTAGCAGTGCTTTAGCCTGGTATCAGCAGAAACCAGGGAAAGCTCCTAAGCTCCTGATCTATGATGCCT |
| | | acid | CCAGTTTGGAAAGTGGGGTCCCATCAAGGTTCAGCGGCAGTGGATCTGGGACAGATTTCACTCTCACCATCAGCAGC |
| | | sequence | CTGCAGCCTGAGGATTTTGCAACTTATTACTGTCAACAGTTTAATAGTTACCCTTGGACGTTCGGCCAAGGGACCAA |
| | | | GGTGGAAATCAAA |
| 333 | IMPI-026 | VL domain | AIQLTQSPSSLSASVGDRVTITCRASQGISSALAWYQQKPGKAPKLLIYDASSLESGVPSRFSGSGSGTDFTLTISS |
| | | amino acid | LQPEDFATYYCQQFNSYPWTFGQGTKVEIK |
| | | sequence | |
| 37 | IMPI-026 | LCDR1 | QGISSA |
| 28 | IMPI-026 | LCDR2 | DAS |
| 76 | IMPI-026 | LCDR3 | QQFNSYPWT |
| 334 | IMPI-007 | VH domain | CAGGTGCAGCTGCAGGAGTCGGGCCCAGGACTGGTGAAGCCTTCGGGGACCCTGTCCCTCACCTGCGCTGTCTCGAG |
| | | nucleic | TGGCTCCATCAGCAGAAGTACCTGGTGGAGTTGGGTCCGCCAGCCCCCAGGGAAGGGGCTGGAGTGGATTGGGGAAA |
| | | acid | TCTATCATAGTGGGAGCACCCAATACAACCCGTCCCTCAAGAGTCGAGTCACCATATCAGTAGACAAGTCCAAGAAC |
| | | sequence | CAGTTCTCCCTGAAGCTGAGTTCTGCGACCGCCGCGGACACGGCCGTGTATTACTGTGCGGGAGAGGGGTCTAACTG |
| | | | GAACTACTGGGGCCAGGGAACCCTGGTCACCGTCTCCTCA |
| 335 | IMPI-007 | VH domain | QVQLQESGPGLVKPSGTLSLTCAVSSGSISRSTWWSWVRQPPGKGLEWIGEIYHSGSTQYNPSLKSRVTISVDKSKN |
| | | amino acid | QFSLKLSSATAADTAVYYCAGEGSNWNYWGQGTLVTVSS |
| | | sequence | |
| 336 | IMPI-007 | HCDR1 | SGSISRSTW |
| 140 | IMPI-007 | HCDR2 | IYHSGST |
| 337 | IMPI-007 | HCDR3 | AGEGSNWNY |
| 338 | IMPI-007 | VL domain | GATGTTGTGATGACTCAGTCTCCACTCTCCCTGCCCGTCACCCTTGGACAGCCGGCCTCCATCTCCTGCAGGTCTAG |
| | | nucleic | TCAAAGCCTCGTATACAGTGATGGAAACACCTACTTGAGTTGGTTTCAGCAGAGGCCAGGCCAATCTCCAAGGCGCC |
| | | acid | TAATTTATAAGGTTTCTAACTGGGACTCTGGGGTCCCAGACAGATTCAGCGGCAGTGGGTCAGGCACTGATTTCACA |
| | | sequence | CTGAGAATCAGCAGGGTGGAGGCTGAGGATATTGGGGTTTATTACTGCATGCAAGGTACACACTGGCCGCTCACTTT |
| | | | CGGCGGAGGGACCAAGGTGGAGCTCAAA |
| 339 | IMPI-007 | VL domain | DVVMTQSPLSLPVTLGQPASISCRSSQSLVYSDGNTYLSWFQQRPGQSPRRLIYKVSNWDSGVPDRFSGSGSGTDFT |
| | | amino acid | LRISRVEAEDIGVYYCMQGTHWPLTFGGGTKVELK |
| | | sequence | |
| 84 | IMPI-007 | LCDR1 | QSLVYSDGNTY |
| 85 | IMPI-007 | LCDR2 | KVS |
| 86 | IMPI-007 | LCDR3 | MQGTHWPLT |
| 340 | IMPI-046 | VH domain | GAGGTGCAGCTGGTGCAGTCTGGAGCAGAGGTGAAAAAGCCCGGGGAGTCTCTGAAGATCTCCTGTAAGGGTTCTGG |
| | | nucleic | ATACAGATTTACCAGTTACTGGATCGGCTGGGTGCGCCAGATGCCCGGGAAAGGCCTGGAGTGGATGGGGATCATCT |
| | | acid | ATCCTGGTGACTCTGATACCAGATACAGCCCGTCCTTCCAAGGCCAGGTCACCATCTCAGCCGACAAGTCCATCAGC |
| | | sequence | ACCGCCTACCTGCAGTGGAGCAGCCTGAAGGCCTCGGACACCGCCATGTATTACTGTGCGAGGTCGTATAACTGGAA |
| | | | CTACTTTGACTACTGGGGCCAGGGAACCCTGGTCACCGTCTCCTCA |
| 341 | IMPI-046 | VH domain | EVQLVQSGAEVKKPGESLKISCKGSGYRFTSYWIGWVRQMPGKGLEWMGIIYPGDSDTRYSPSFQGQVTISADKSIS |
| | | amino acid | TAYLQWSSLKASDTAMYYCARSYNWNYFDYWGQGTLVTVSS |
| | | sequence | |
| 342 | IMPI-046 | HCDR1 | GYRFTSYW |
| 33 | IMPI-046 | HCDR2 | IYPGDSDT |
| 34 | IMPI-046 | HCDR3 | ARSYNWNYFDY |
| 343 | IMPI-046 | VL domain | GCCATCCAGTTGACCCAGTCTCCATCCTCCCTGTCTGCATCTGTAGGAGACAGAGTCACCATCACTTGCCGGGCAAG |
| | | nucleic | TCAGGGCATTAGCAGTGCTTTAGCCTGGTATCAGCAGAAACCAGGGAAAGCTCCTAAGCTCCTGATCTATGATGCCT |
| | | acid | CCAGTTTGGAAAGTGGGGTCCCACCAAGGTTCAGCGGCAGTGGATCTGGGACAGATTTCACTCTCACCATCAGCAGC |
| | | sequence | CTGCAGCCTGAAGATTTTGCAACTTATTACTGTCAACAGTTTATTAGTTACCCTTGGACGTTCGGCCAAGGGACCAA |
| | | | GGTGGAAATCAAA |
| 344 | IMPI-046 | VL domain | AIQLTQSPSSLSASVGDRVTITCRASQGISSALAWYQQKPGKAPKLLIYDASSLESGVPPRFSGSGSGTDFTLTISS |
| | | amino acid | LQPEDFATYYCQQFISYPWTFGQGTKVEIK |
| | | sequence | |
| 37 | IMPI-046 | LCDR1 | QGISSA |
| 28 | IMPI-046 | LCDR2 | DAS |
| 38 | IMPI-046 | LCDR3 | QQFISYPWT |
| 220 | IMPI-060 | VH domain | GAGGTGCAGCTGGTGGAGTCTGGAGGAGGCTTGATCCAGCCTGGGGGGTCCCTGAGACTCTCCTGTGCAGCCTCTGG |
| | | nucleic | GGTCACCGTCAGTAGCAACTACATGAGCTGGGTCCGCCAGGCTCCAGGGAAGGGGCTGGAGTGGGTCTCAGTTATTT |
| | | acid | ATAGCGGTGGTAGCACATTCTACGCAGACTCCGTGAAGGGCCGATTCACCATCTCCAGAGACAATTCCAAGAACACG |
| | | sequence | CTGTATCTTCAAATGAACAGCCTGAGAGCCGAGGACACGGCCGTGTATTACTGTGCGAGAGATCTCTCCTACTACGG |
| | | | TATGGACGTCTGGGGCCAAGGGACCACGGTCACCGTCTCCTCA |
| 221 | IMPI-060 | VH domain | EVQLVESGGGLIQPGGSLRLSCAASGVTVSSNYMSWVRQAPGKGLEWVSVIYSGGSTFYADSVKGRFTISRDNSKNT |
| | | amino acid | LYLQMNSLRAEDTAVYYCARDLSYYGMDVWGQGTTVTVSS |
| | | sequence | |
| 3 | IMPI-060 | HCDR1 | GVTVSSNY |
| 14 | IMPI-060 | HCDR2 | IYSGGST |
| 222 | IMPI-060 | HCDR3 | ARDLSYYGMDV |
| 345 | IMPI-060 | VL domain | GACATCCAGTTGACCCAGTCTCCATCCTTCCTGTCTGCATCTGTAGGAGACAGAGTCACCATCACTTGCTGGGCCAG |
| | | nucleic | TCAGGGCATTAGCAGTTATTTAGCCTGGTATCAGCAAAAACCAGGGAAAGCCCCTAAGCTCCTGATCTATGCTGCAT |
| | | acid | CCACTTTGCAAAGTGGGGTCCCATCAAAATTCAGCGGCAGTGGATCTGGGACAGAATTCACTCTCACAATCAGCAGC |
| | | sequence | CTGCAGCCTGAAGATTTTGCAACTTATTACTGTCAACAGCTTAATAGTTACCCGAGCAGTTTTGGCCAGGGGACCAA |
| | | | GCTGGAGATCAAA |
| 346 | IMPI-060 | VL domain | DIQLTQSPSFLSASVGDRVTITCWASQGISSYLAWYQQKPGKAPKLLIYAASTLQSGVPSKFSGSGSGTEFTLTISS |
| | | amino acid | LQPEDFATYYCQQLNSYPSSFGQGTKLEIK |
| | | sequence | |
| 8 | IMPI-060 | LCDR1 | QGISSY |
| 18 | IMPI-060 | LCDR2 | AAS |
| 347 | IMPI-060 | LCDR3 | QQLNSYPSS |
| 348 | IMPI-056 | VH domain | GAGGTGCAGCTGGTGGAGTCTGGAGGAGGCTTGATCCAGCCTGGGGGGTCCCTGAGACTCTCCTGTGCAGCCTCTGG |
| | | nucleic | GCTCACCGTCAGTAGCAACTACATGAACTGGGTCCGCCAGGCTCCAGGGAAAAAACTGGAGTGGGTCTCAGTTATTT |
| | | acid | ATAGCGGAGGTAGCACATTTTACGCAGACTCCGTGAGGGGCCGATTCACCATCTCCAGAGACAATTCCAAGAACACG |
| | | sequence | CTGTTTCTTCAAATGAACAGCCTGAGAGCCGAGGACTCGGCCGTGTATTACTGTGCGAGAGATTTGGGACCCTACGG |
| | | | TGTGGACGTCTGGGGCCAAGGGACCACGGTCACCGTCTCCTCA |
| 349 | IMPI-056 | VH domain | EVQLVESGGGLIQPGGSLRLSCAASGLTVSSNYMNWVRQAPGKKLEWVSVIYSGGSTFYADSVRGRFTISRDNSKNT |
| | | amino acid | LFLQMNSLRAEDSAVYYCARDLGPYGVDVWGQGTTVTVSS |
| | | sequence | |
| 172 | IMPI-056 | HCDR1 | GLTVSSNY |
| 14 | IMPI-056 | HCDR2 | IYSGGST |
| 106 | IMPI-056 | HCDR3 | ARDLGPYGVDV |
| 350 | IMPI-056 | VL domain | GACATCCAGTTGACCCAGTCTCCATCCTTCCTGTCTGCATCTGTAGGAGACAGAGTCACCATCACTTGCTGGGCCAG |
| | | nucleic | TCAGGGCATTAGCAGTTATTTAGCCTGGTATCAGCAAAAACCAGGGAAAGCCCCTAAACTCCTGATCTATGCTGCAT |
| | | acid | CCACTTTGCAAAGTGGGGTCCCATCAAGGTTCAGCGGCAGTGGATCTGGGACAGAATTCACTCTCACAATCAGCAGC |
| | | sequence | CTGCAGCCTGAAGATTTTGCAACTTATTACTGTCAACAGCTTAATAGTTACCCTCTCACCTTCGGCCAAGGGACACG |
| | | | ACTGGAGATTAAA |
| 351 | IMPI-056 | VL domain | DIQLTQSPSFLSASVGDRVTITCWASQGISSYLAWYQQKPGKAPKLLIYAASTLQSGVPSRFSGSGSGTEFTLTISS |
| | | amino acid | LQPEDFATYYCQQLNSYPLTFGQGTRLEIK |
| | | sequence | |
| 8 | IMPI-056 | LCDR1 | QGISSY |
| 18 | IMPI-056 | LCDR2 | AAS |
| 10 | IMPI-056 | LCDR3 | QQLNSYPLT |
| 352 | IMPI-061 | VH domain | GAGGTGCAGCTGGTGGAGTCTGGGGGAGGTGTGGTACGGCCTGGGGGGTCCCTGAGACTCTCCTGTGCAGCCTCTGG |
| | | nucleic | ATTCACCTTTGATGATTATGGCATGAGCTGGGTCCGCCAAGCTCCAGGGAAGGGGCTGGAGTGGGTCTCTGGTATTT |
| | | acid | ATTGGAATGGTGGTAGCACAGGTTATGCAGACTCTGTGAAGGGCCGATTCACCATCTCCAGAGACAACGCCAAGAAC |
| | | sequence | TCCCTGTATCTGCAAATGAACAGTCTGAGAGCCGAGGACACGGCCTTGTATTACTGTGCGAGAGGAGTGGGAGCTAC |
| | | | AGACTACTGGGGCCAGGGAACCCTGGTCACCGTCTCCTCA |
| 353 | IMPI-061 | VH domain | EVQLVESGGGVVRPGGSLRLSCAASGFTFDDYGMSWVRQAPGKGLEWVSGIYWNGGSTGYADSVKGRFTISRDNAKN |
| | | amino acid | SLYLQMNSLRAEDTALYYCARGVGATDYWGQGTLVTVSS |
| | | sequence | |
| 354 | IMPI-061 | HCDR1 | GFTFDDYG |
| 355 | IMPI-061 | HCDR2 | IYWNGGST |
| 356 | IMPI-061 | HCDR3 | ARGVGATDY |
| 357 | IMPI-061 | VL domain | GAAATTGTGTTGACGCAGTCTCCAGGCACCCTGTCTTTGTCTCCAGGGGAAAGAGCCACCCTCTCCTGCAGGGCCAG |
| | | nucleic | TCAGAGTGTTAGCGGCAGCCTCTTAGCCTGGTACCAGCAGAAACCTGGCCAGGCTCCCAGGCTCCTCATCTATGGTG |
| | | acid | CATCCAGAAGGGCCACTGGCATCCCAGACAGGTTCAGTGGCAGTGGGTCTGGGACAGACTTCACTCTCACCATCAGC |
| | | sequence | AGACTGGAGCCTGAAGATTTTGCAGTGTATTACTGTCAGCAATATGGTAACTCACCCATGTGCAGTTTTGGCCAGGG |
| | | | GACCAAGCTGGAGAGCAAA |
| 358 | IMPI-061 | VL domain | EIVLTQSPGTLSLSPGERATLSCRASQSVSGSLLAWYQQKPGQAPRLLIYGASRRATGIPDRFSGSGSGTDFTLTIS |
| | | amino acid | RLEPEDFAVYYCQQYGNSPMCSFGQGTKLESK |
| | | sequence | |
| 359 | IMPI-061 | LCDR1 | QSVSGSL |
| 157 | IMPI-061 | LCDR2 | GAS |
| 360 | IMPI-061 | LCDR3 | QQYGNSPMCS |
| 361 | IMPI-062 | VH domain | GAGGTGCAGCTGGTGGAGTCTGGGGGAGGTGTGGTACGGCCTGGGGGGTCCCTGAGACTCTCCTGTGCAGCCTCTGG |
| | | nucleic | ATTCACCTTTGATGATTATGGCATGAGCTGGGTCCGCCAAGCTCCAGGGAAGGGGCTGGAGTGGGTCTCTGGTATTT |
| | | acid | ATTGGAATGGTGGTAGTACAGGTTATGCAGACTCTGTGAAGGGCCGATTCACCATCTCCAGAGACAACGCCAAGAAC |
| | | sequence | TCCCTGTATCTGCAAATGAACAGTCTGAGAGCCGAGGACACGGCCTTGTATTACTGTGCGAGAGGAGTGGGAGCTAC |
| | | | AGACTACTGGGGCCAGGGAACCCTGGTCACCGTCTCCTCA |
| 353 | IMPI-062 | VH domain | EVQLVESGGGVVRPGGSLRLSCAASGFTFDDYGMSWVRQAPGKGLEWVSGIYWNGGSTGYADSVKGRFTISRDNAKN |
| | | amino acid | SLYLQMNSLRAEDTALYYCARGVGATDYWGQGTLVTVSS |
| | | sequence | |
| 354 | IMPI-062 | HCDR1 | GFTFDDYG |
| 355 | IMPI-062 | HCDR2 | IYWNGGST |
| 356 | IMPI-062 | HCDR3 | ARGVGATDY |
| 362 | IMPI-062 | VL domain | GAAATTGTGTTGACGCAGTCTCCAGGCACCCTGTCTTTGTCTCCAGGGGAAAGAGCCACCCTCTCCTGCAGGGCCAG |
| | | nucleic | TCAGAGTGTTAGAGGCAGCTTCTTAGCCTGGTACCAGCAGAAACCTGGCCAGGCTCCCAGGCTCCTCATCTATGGTG |
| | | acid | CATCCAGGAGGGCCACTGGCATCCCAGACAGGTTCAGTGGCAGTGGGTCTGGGACAGACTTCACTCTCACCATCAGC |
| | | sequence | AGACTGGAGCCTGAAGATTTTGCAGTGTATTACTGTCAGCAATATGGTAACTCACCCATGTGCAGTTTTGGCCAGGG |
| | | | GACCAAGCTGGAGATCAAA |
| 363 | IMPI-062 | VL domain | EIVLTQSPGTLSLSPGERATLSCRASQSVRGSFLAWYQQKPGQAPRLLIYGASRRATGIPDRFSGSGSGTDFTLTIS |
| | | amino acid | RLEPEDFAVYYCQQYGNSPMCSFGQGTKLEIK |
| | | sequence | |
| 364 | IMPI-062 | LCDR1 | QSVRGSF |
| 157 | IMPI-062 | LCDR2 | GAS |
| 360 | IMPI-062 | LCDR3 | QQYGNSPMCS |
| 365 | IMPI-063 | VH domain | GAGGTGCAGCTGGTGGAGTCTGGGGGAGGTGTGGTACGGCCTGGGGGGTCCCTGAGACTCTCCTGTGCAGCCTCTGG |
| | | nucleic | ATTCACCTTTGATGATTATGGCATGAGCTGGGTCCGCCAAGCTCCAGGGAAGGGGCTGGAGTGGGTCTCTGGTATTT |
| | | acid | ATTGGAATGGTGGTAGCACAGGTTATGCAGACTCTGTGAAGGGCCGATTCACCATCTCCAGAGACAACGCCAAGAAC |
| | | sequence | TCCCTGTATCTGCAAATGAACAGTCTGAGAGCCGAGGACATGGCCTTGTATTACTGTGCGAGAGGAGTGGGAGCTAC |
| | | | AGACTACTGGGGCCAGGGAACCCTGGTCACCGTCTCCTCA |
| 366 | IMPI-063 | VH domain | EVQLVESGGGVVRPGGSLRLSCAASGFTFDDYGMSWVRQAPGKGLEWVSGIYWNGGSTGYADSVKGRFTISRDNAKN |
| | | amino acid | SLYLQMNSLRAEDMALYYCARGVGATDYWGQGTLVTVSS |
| | | sequence | |
| 354 | IMPI-063 | HCDR1 | GFTFDDYG |
| 355 | IMPI-063 | HCDR2 | IYWNGGST |
| 356 | IMPI-063 | HCDR3 | ARGVGATDY |
| 367 | IMPI-063 | VL domain | GAAATTGTGTTGACGCAGTCTCCAGGCACCCTGTCTTTGTCTTCAGGGGAAAGAGCCACCCTCGCCTGCAGGGCCAG |
| | | nucleic | TGAGAGTGTTAGAGGCAGCTTCTTAGCCTGGTACCAGCAGAAACCTGGCCAGGCTCCCAGGCTCCTCATCTATGGTG |
| | | acid | CATCCAGGAGGGCCACTGGCATCCCAGACAGGTTCAGTGGCAGTGGGTCTGGGACAGACTTCACTCTCACCATCAGC |
| | | sequence | AGACTGGAGCCTGAGGATTTTGCAGTGTATTACTGTCAGCAATATGGTAATTCACCCATGTGCAGTTTTGGCCAGGG |
| | | | GACCAAGCTGGAGATCAAA |
| 368 | IMPI-063 | VL domain | EIVLTQSPGTLSLSSGERATLACRASESVRGSFLAWYQQKPGQAPRLLIYGASRRATGIPDRFSGSGSGTDFTLTIS |
| | | amino acid | RLEPEDFAVYYCQQYGNSPMCSFGQGTKLEIK |
| | | sequence | |
| 369 | IMPI-063 | LCDR1 | ESVRGSF |
| 157 | IMPI-063 | LCDR2 | GAS |
| 360 | IMPI-063 | LCDR3 | QQYGNSPMCS |
| 370 | IMPI-064 | VH domain | GAGGTGCAACTGGTGGAGTCTGGGGGAGGTGTGGTACGGCCTGGGGGGTCCCTGAGACTCTCCTGTGCAGCCTCTGG |
| | | nucleic | ATTCACCTTTGATGATTATGGCATGAGCTGGGTCCGCCAAGCTCCAGGGAAGGGGCTGGAGTGGGTCTCTGGTATTT |
| | | acid | ATTGGAATGGTGGTAGCACAGGTTATGCAGACTCTGTGAAGGGCCGATTCACCATCTCCAGAGACAACGCCAAGAAC |
| | | sequence | TCCCTGTATCTGCAAATGAACAGTCTGAGAGCCGAGGACACGGCCTTGTATTACTGTGCGAGAGGAGTGGGAGCTAC |
| | | | AGACTACTGGGGCCAGGGAACCCTGGTCACCGTCTCCTCA |
| 353 | IMPI-064 | VH domain | EVQLVESGGGVVRPGGSLRLSCAASGFTFDDYGMSWVRQAPGKGLEWVSGIYWNGGSTGYADSVKGRFTISRDNAKN |
| | | amino acid | SLYLQMNSLRAEDTALYYCARGVGATDYWGQGTLVTVSS |
| | | sequence | |
| 354 | IMPI-064 | HCDR1 | GFTFDDYG |
| 355 | IMPI-064 | HCDR2 | IYWNGGST |
| 356 | IMPI-064 | HCDR3 | ARGVGATDY |
| 371 | IMPI-064 | VL domain | GAAATTGTGTTGACGCAGTCTCCAGGCACCCTTTTTTTGTCTCCAGGGGAAAGAGCCACCCTCTCCTGCAGGGCCAG |
| | | nucleic | TCAGAGTGTTCGCGGCAGCTTCTTAGCCTGGTATCAACAGAAACCTGGCCAGGCTCCCAGGCTCCTCATCTATGGTG |
| | | acid | CATCCAGGAGGGCCACTGGCATCCCAGACAGGTTCAGTGGCAGTGGGTCTGGGACAGACTTCACTCTCACCATCAGT |
| | | sequence | AGACTGGAGCCTGAAGATTTTGCAGTGTATTACTGTCAGCAATATGGTCACTCACCCATGTGCAGTTTTGGCCAGGG |
| | | | GACCAAGCTGGAGATCAAA |
| 372 | IMPI-064 | VL domain | EIVLTQSPGTLFLSPGERATLSCRASQSVRGSFLAWYQQKPGQAPRLLIYGASRRATGIPDRFSGSGSGTDFTLTIS |
| | | amino acid | RLEPEDFAVYYCQQYGHSPMCSFGQGTKLEIK |
| | | sequence | |
| 364 | IMPI-064 | LCDR1 | QSVRGSF |
| 157 | IMPI-064 | LCDR2 | GAS |
| 373 | IMPI-064 | LCDR3 | QQYGHSPMCS |
| 352 | IMPI-065 | VH domain | GAGGTGCAGCTGGTGGAGTCTGGGGGAGGTGTGGTACGGCCTGGGGGGTCCCTGAGACTCTCCTGTGCAGCCTCTGG |
| | | nucleic | ATTCACCTTTGATGATTATGGCATGAGCTGGGTCCGCCAAGCTCCAGGGAAGGGGCTGGAGTGGGTCTCTGGTATTT |
| | | acid | ATTGGAATGGTGGTAGCACAGGTTATGCAGACTCTGTGAAGGGCCGATTCACCATCTCCAGAGACAACGCCAAGAAC |
| | | sequence | TCCCTGTATCTGCAAATGAACAGTCTGAGAGCCGAGGACACGGCCTTGTATTACTGTGCGAGAGGAGTGGGAGCTAC |
| | | | AGACTACTGGGGCCAGGGAACCCTGGTCACCGTCTCCTCA |
| 353 | IMPI-065 | VH domain | EVQLVESGGGVVRPGGSLRLSCAASGFTFDDYGMSWVRQAPGKGLEWVSGIYWNGGSTGYADSVKGRFTISRDNAKN |
| | | amino acid | SLYLQMNSLRAEDTALYYCARGVGATDYWGQGTLVTVSS |
| | | sequence | |
| 354 | IMPI-065 | HCDR1 | GFTFDDYG |
| 355 | IMPI-065 | HCDR2 | IYWNGGST |
| 356 | IMPI-065 | HCDR3 | ARGVGATDY |
| 374 | IMPI-065 | VL domain | GAAATTGTGTTGACGCAGTCTCCAGGCACCCTGTCTTTGTCTCCAGGGGAAAGAGCCACCCTCTCCTGTAGGGCCAG |
| | | nucleic | TCAGAGTGTTAGGGGCAGCTTCTTAGCCTGGTACCAGCAGAAACCTGGCCAGGCTCCCAGGCTCCTCATCTATGGTG |
| | | acid | CATCCAGCAGGGCCACTGGCATCCCAGACAGGTTCAGTGGCAGTGGGTCTGGGACAGACTTCACTCTCACCATCAGC |
| | | sequence | AGACTGGAGCCTGAAGATTTTGCAGTGTATTACTGTCAGCAATATGGTAAATCACCCATGTGCAGTTTTGGCCAGGG |
| | | | GACCAACCTGGAGATCAAA |
| 375 | IMPI-065 | VL domain | EIVLTQSPGTLSLSPGERATLSCRASQSVRGSFLAWYQQKPGQAPRLLIYGASSRATGIPDRFSGSGSGTDFTLTIS |
| | | amino acid | RLEPEDFAVYYCQQYGKSPMCSFGQGTNLEIK |
| | | sequence | |
| 364 | IMPI-065 | LCDR1 | QSVRGSF |
| 157 | IMPI-065 | LCDR2 | GAS |
| 376 | IMPI-065 | LCDR3 | QQYGKSPMCS |
| 377 | IMPI-066 | VH domain | GAGGTGCAGCTGGTGGAGTCTGGGGGAGGTGTGGTACGGCCTGGGGGGTCCCTGAGACTCTCCTGTGCAGCCTCTGG |
| | | nucleic | ATTCACCTTTGATGATTATGGCATGACCTGGGTCCGCCAAGCTCCAGGGAAGGGGCTGGAGTGGGTCTCTGGTATTA |
| | | acid | ATTGGAATGGAGGTAGCACAGGTTCTGCAGACTCTGTGAAGGGCCGATTCACCATCTCCAGAGACAACGCCAAGAAC |
| | | sequence | TCCCTGTGTCTGCAAATGAACAGTCTGAGAGCCGAGGACACGGCCTTGTATTACTGTGCGAGAGGAGTGGGAGCTAC |
| | | | AGATTACTGGGGCCAGGGAACCCTGGTCACCGTCTCCTCA |
| 378 | IMPI-066 | VH domain | EVQLVESGGGVVRPGGSLRLSCAASGFTFDDYGMTWVRQAPGKGLEWVSGINWNGGSTGSADSVKGRFTISRDNAKN |
| | | amino acid | SLCLQMNSLRAEDTALYYCARGVGATDYWGQGTLVTVSS |
| | | sequence | |
| 354 | IMPI-066 | HCDR1 | GFTFDDYG |
| 379 | IMPI-066 | HCDR2 | INWNGGST |
| 356 | IMPI-066 | HCDR3 | ARGVGATDY |
| 380 | IMPI-066 | VL domain | GAAATTGTGTTGACGCAGTCTCCAGGCACCCTGTCTTTGTCTCCAGGGGAAAGAGCCACCCTCTCCTGCAGGGCCAG |
| | | nucleic | TCAGAGTGTTAGCAGCAGCTTCTTAGCCTGGTACCAGCAAAAACCTGGCCAGGCTCCCAGGCTCCTCATCTATGGTG |
| | | acid | CATCCCGCAGGTCCACTGGCATCCCAGACAGGTTCAGTGGCAGTGGGTCTGGGACAGACTTCACTCTCACCATCAGC |
| | | sequence | AGACTGGAGCCTGAAGATTTTGCAGTGTATTACTGTCAGCAGTATGGTAGCTCACCCATGTCCAGTTTTGGCCAGGG |
| | | | GACCAAGCTGGAGATCAAA |
| 381 | IMPI-066 | VL domain | EIVLTQSPGTLSLSPGERATLSCRASQSVSSSFLAWYQQKPGQAPRLLIYGASRRSTGIPDRFSGSGSGTDFTLTIS |
| | | amino acid | RLEPEDFAVYYCQQYGSSPMSSFGQGTKLEIK |
| | | sequence | |
| 382 | IMPI-066 | LCDR1 | QSVSSSF |
| 157 | IMPI-066 | LCDR2 | GAS |
| 383 | IMPI-066 | LCDR3 | QQYGSSPMSS |
| 384 | IMPI-067 | VH domain | CAGGTGCAGCTGGTGGAGTCTGGGGGAGGCGTGGTCCAGCCTGGGACGTCCCTGAGACTCTCCTGTGCAGCCTCTGG |
| | | nucleic | ATTCACCTTCAATAGCTTTGGCATGCACTGGGTCCGCCAGGCTCCAGGCAAGGGGCTGGAGTGGGTGGCAGTTATAT |
| | | acid | CATATGATGGAAGTAGTAAATACTATGCAGACTCCGTGAAGGGCCGATTCACCATCTCCAGAGACAATTCCAAGAAC |
| | | sequence | ACGCTGTATCTGCAAATGAACAGCCTGAGAGCGGAGGACACGGCTGTGTATTACTGTGCGAAAGATGAGGGGGACTA |
| | | | CGACGACTACTACTACGGTATGGACGTCTGGGGCCAGGGGACCACGGTCACCGTCTCCTCA |
| 385 | IMPI-067 | VH domain | QVQLVESGGGVVQPGTSLRLSCAASGFTFNSFGMHWVRQAPGKGLEWVAVISYDGSSKYYADSVKGRFTISRDNSKN |
| | | amino acid | TLYLQMNSLRAEDTAVYYCAKDEGDYDDYYYGMDVWGQGTTVTVSS |
| | | sequence | |
| 386 | IMPI-067 | HCDR1 | GFTFNSFG |
| 387 | IMPI-067 | HCDR2 | ISYDGSSK |
| 388 | IMPI-067 | HCDR3 | AKDEGDYDDYYYGMDV |
| 389 | IMPI-067 | VL domain | GAAATTGTGTTGACGCAGTCTCCAGGCAGTCTGTCTTTGTCTCCAGGGGAAAGAGCCACCCTCTCCTGCAGGGCCAG |
| | | nucleic | TCAGAGTCTTAGCAGCAGATACTTGGCCTGGTACCACCAGAAACCTGGCCAGGCTCCCAGGCTCCTCATCTATGGTG |
| | | acid | CATCCAGCAGGGCCACTGGCATCCCAGACAGGTTCAGTGGCAGTGGGTCTGGGACAGACTTCACTCTCACCATCAGC |
| | | sequence | GGACTGGAGCCTGAAGATTTTGCAGTGTATTACTGTCAGCAGTATGGCAACTCAATCACTTTCGGCGGAGGGACCAA |
| | | | GGTGGAAATCAAA |
| 390 | IMPI-067 | VL domain | EIVLTQSPGSLSLSPGERATLSCRASQSLSSRYLAWYHQKPGQAPRLLIYGASSRATGIPDRFSGSGSGTDFTLTIS |
| | | amino acid | GLEPEDFAVYYCQQYGNSITFGGGTKVEIK |
| | | sequence | |
| 391 | IMPI-067 | LCDR1 | QSLSSRY |
| 157 | IMPI-067 | LCDR2 | GAS |
| 392 | IMPI-067 | LCDR3 | QQYGNSIT |
| 393 | IMPI-068 | VH domain | CAGGTGCAGCTGGTGGAGTCTGGGGGAGACGTGGTCCAGCCTGGGAGGTCCCTGAGACTCTCCTGTGCAGCCTCTGG |
| | | nucleic | ATTCACCTTCAGTCGCTATGGCATGCACTGGGTCCGCCAGGCTCCAGGCAAGGGGCTGGAGTGGGTGGCAGTTATAT |
| | | acid | CATATGATGGAAGTGATAAATACTATGCAGACTCCGTGAAGGGCCGATTCACCATCTCCAGAGACAATTCCAAGAAC |
| | | sequence | ACGCTGTATCTGCAAATGAACAGCCTGAGAGCTGAGGACACGGCTGTGTATTACTGTGCGAAACAGCTGCCCCTTTA |
| | | | CTACTACTACTACGGTATGGACGTCTGGGGCCAAGGGACCACGGTCACCGTCTCCTCA |
| 394 | IMPI-068 | VH domain | QVQLVESGGDVVQPGRSLRLSCAASGFTFSRYGMHWVRQAPGKGLEWVAVISYDGSDKYYADSVKGRFTISRDNSKN |
| | | amino acid | TLYLQMNSLRAEDTAVYYCAKQLPLYYYYYGMDVWGQGTTVTVSS |
| | | sequence | |
| 395 | IMPI-068 | HCDR1 | GFTFSRYG |
| 113 | IMPI-068 | HCDR2 | ISYDGSDK |
| 396 | IMPI-068 | HCDR3 | AKQLPLYYYYYGMDV |
| 397 | IMPI-068 | VL domain | GCCATCCAGTTGACCCAGTCTCCATCCTCCCTGTCTGCATCTGTAGGAGACAGAGTCACCATCACTTGCCGGGCAAG |
| | | nucleic | TCAGGGCATTAGCAGTGCTTTAGCCTGGTATCAGCAGAAACCAGGGAAAGCTCCTAACCTCCTAATCTATGATGCCT |
| | | acid | CCAGTTTGGAAAGTGGGGTCCCATCAAGGTTCAGCGGCAGTGGATCTGGGACAGATTTCACTCTCACCATCAGCAGC |
| | | sequence | CTGCAGCCTGAAGATTTTGCAACTTATTACTGTCAACAGTTTAATATTTACCCTCACACTTTCGGCCCTGGGACCAA |
| | | | AGTGGATATCAAA |
| 398 | IMPI-068 | VL domain | AIQLTQSPSSLSASVGDRVTITCRASQGISSALAWYQQKPGKAPNLLIYDASSLESGVPSRFSGSGSGTDFTLTISS |
| | | amino acid | LQPEDFATYYCQQFNIYPHTFGPGTKVDIK |
| | | sequence | |
| 37 | IMPI-068 | LCDR1 | QGISSA |
| 28 | IMPI-068 | LCDR2 | DAS |
| 399 | IMPI-068 | LCDR3 | QQFNIYPHT |
| 400 | IMPI-069 | VH domain | GAGGTGCAACTGGTGGAGTCTGGGGGAGGTGTGGTACGGCCTGGGGGGTCCCTGAGACTCTCCTGTGCAGCCTCTGG |
| | | nucleic | ATTCACCTTTGATGATTATGGCATGACCTGGGTCCGCCAAGCTCCAGGGAAGGGGCTGGAGTGGGTCTCTGGTATTT |
| | | acid | ATTGGAATGGTGGTAGCACAGGTTATGCAGACTCTGTGAAGGGCCGATTCACCATCTCCAGAGACAACGCCAAGAAC |
| | | sequence | TCCCTGTATCTGCAAATGAACAGTCTGAGAGCCGAGGACACGGCCTTGTATTACTGTGCGAGAGGAGTGGGAGCTAC |
| | | | AGACTACTGGGGCCAGGGAACCCTGGTCACCGTCTCCTCA |
| 401 | IMPI-069 | VH domain | EVQLVESGGGVVRPGGSLRLSCAASGFTFDDYGMTWVRQAPGKGLEWVSGIYWNGGSTGYADSVKGRFTISRDNAKN |
| | | amino acid | SLYLQMNSLRAEDTALYYCARGVGATDYWGQGTLVTVSS |
| | | sequence | |
| 354 | IMPI-069 | HCDR1 | GFTFDDYG |
| 355 | IMPI-069 | HCDR2 | IYWNGGST |
| 356 | IMPI-069 | HCDR3 | ARGVGATDY |
| 402 | IMPI-069 | VL domain | GAAATTGTGTTGACGCAGTCTCCAGGCACCCTGTTTTTGTCTCCAGGGGAAAGAGCCACCCTCTCCTGCAGGACCAG |
| | | nucleic | TCAGAATATTAGCGGCAGCTTCTTAGCCTGGTACCAGCAGAAATCTGGCCAGGTTCCCAGGCTCCTCATCTATGGTG |
| | | acid | CATCCAGGAGGGCCACTGGCATCCCAGACAGGTTCAGTGGCAGTGGGTCTGGGACAGACTTCACTCTCACCATCAGC |
| | | sequence | AGACTGGAGCCTGAAGATTTTGCAGTGTATTACTGTCAGCAATATGGTAACTCACCCATGTGCAGTTTTGGCCAGGG |
| | | | GACCAAGCTGGAGATCAAA |
| 403 | IMPI-069 | VL domain | EIVLTQSPGTLFLSPGERATLSCRTSQNISGSFLAWYQQKSGQVPRLLIYGASRRATGIPDRFSGSGSGTDFTLTIS |
| | | amino acid | RLEPEDFAVYYCQQYGNSPMCSFGQGTKLEIK |
| | | sequence | |
| 404 | IMPI-069 | LCDR1 | QNISGSF |
| 157 | IMPI-069 | LCDR2 | GAS |
| 360 | IMPI-069 | LCDR3 | QQYGNSPMCS |
| 370 | IMPI-070 | VH domain | GAGGTGCAACTGGTGGAGTCTGGGGGAGGTGTGGTACGGCCTGGGGGGTCCCTGAGACTCTCCTGTGCAGCCTCTGG |
| | | nucleic | ATTCACCTTTGATGATTATGGCATGAGCTGGGTCCGCCAAGCTCCAGGGAAGGGGCTGGAGTGGGTCTCTGGTATTT |
| | | acid | ATTGGAATGGTGGTAGCACAGGTTATGCAGACTCTGTGAAGGGCCGATTCACCATCTCCAGAGACAACGCCAAGAAC |
| | | sequence | TCCCTGTATCTGCAAATGAACAGTCTGAGAGCCGAGGACACGGCCTTGTATTACTGTGCGAGAGGAGTGGGAGCTAC |
| | | | AGACTACTGGGGCCAGGGAACCCTGGTCACCGTCTCCTCA |
| 353 | IMPI-070 | VH domain | EVQLVESGGGVVRPGGSLRLSCAASGFTFDDYGMSWVRQAPGKGLEWVSGIYWNGGSTGYADSVKGRFTISRDNAKN |
| | | amino acid | SLYLQMNSLRAEDTALYYCARGVGATDYWGQGTLVTVSS |
| | | sequence | |
| 354 | IMPI-070 | HCDR1 | GFTFDDYG |
| 355 | IMPI-070 | HCDR2 | IYWNGGST |
| 356 | IMPI-070 | HCDR3 | ARGVGATDY |
| 405 | IMPI-070 | VL domain | GAAAATGTGTTGACGCAGTCTCCAGGCACCCTGTTTTTGTCTCCAGGGGAAAGAGCCACCCTCTCCTGCAGGGCCAG |
| | | nucleic | TCAGAGTGTTAGCGGCAGCTTCTTAGCCTGGTACCAGCAGAAACCTGGCCAGGCTCCCAGGCTCCTCATTTATGGTG |
| | | acid | CATCCAGGAGGGCCACTGGCATCCCAGACAGGTTCAGTGGCAGTGGGGCTGGGACAGACTTCACTCTCACCATCAGC |
| | | sequence | AGACTGGAGCCTGAAGATTTTGCAGTGTATTACTGTCAGCAATATAATAACTCACCCATGTGCAGTTTTGGCCAGGG |
| | | | GACCAAGCTGGAGATCAAA |
| 406 | IMPI-070 | VL domain | ENVLTQSPGTLFLSPGERATLSCRASQSVSGSFLAWYQQKPGQAPRLLIYGASRRATGIPDRFSGSGAGTDFTLTIS |
| | | amino acid | RLEPEDFAVYYCQQYNNSPMCSFGQGTKLEIK |
| | | sequence | |
| 407 | IMPI-070 | LCDR1 | QSVSGSF |
| 157 | IMPI-070 | LCDR2 | GAS |
| 408 | IMPI-070 | LCDR3 | QQYNNSPMCS |
| 370 | IMPI-071 | VH domain | GAGGTGCAACTGGTGGAGTCTGGGGGAGGTGTGGTACGGCCTGGGGGGTCCCTGAGACTCTCCTGTGCAGCCTCTGG |
| | | nucleic | ATTCACCTTTGATGATTATGGCATGAGCTGGGTCCGCCAAGCTCCAGGGAAGGGGCTGGAGTGGGTCTCTGGTATTT |
| | | acid | ATTGGAATGGTGGTAGCACAGGTTATGCAGACTCTGTGAAGGGCCGATTCACCATCTCCAGAGACAACGCCAAGAAC |
| | | sequence | TCCCTGTATCTGCAAATGAACAGTCTGAGAGCCGAGGACACGGCCTTGTATTACTGTGCGAGAGGAGTGGGAGCTAC |
| | | | AGACTACTGGGGCCAGGGAACCCTGGTCACCGTCTCCTCA |
| 353 | IMPI-071 | VH domain | EVQLVESGGGVVRPGGSLRLSCAASGFTFDDYGMSWVRQAPGKGLEWVSGIYWNGGSTGYADSVKGRFTISRDNAKN |
| | | amino acid | SLYLQMNSLRAEDTALYYCARGVGATDYWGQGTLVTVSS |
| | | sequence | |
| 354 | IMPI-071 | HCDR1 | GFTFDDYG |
| 355 | IMPI-071 | HCDR2 | IYWNGGST |
| 356 | IMPI-071 | HCDR3 | ARGVGATDY |
| 409 | IMPI-071 | VL domain | GAAATTGTGTTGACGCAGTCTCCAGGCACCCTGTTTTTGTCTCCAGGGGAAAGAGCCACCCTCTCCTGCAGGGCCAG |
| | | nucleic | TCAGAGTGTTCGCGGCAGCTTCTTAGCCTGGTATCAGCAGAAACCTGGCCAGGCTCCCAGGCTCCTCATCAATGGTG |
| | | acid | CATCCAGGAGGGCCACTGGCATCCCAGACAGGTTCAGTGGCAGTGGGTCTGGGACAGACTTCACTCTCACCATCAGT |
| | | sequence | AGACTGGAGCCTGAAGATTTTGCAGTGTATTACTGTCAGCAATATGGTAACTCACCCATGTGCAGTTTTGGCCAGGG |
| | | | GACCAAGCTGGAGATCAAA |
| 410 | IMPI-071 | VL domain | EIVLTQSPGTLFLSPGERATLSCRASQSVRGSFLAWYQQKPGQAPRLLINGASRRATGIPDRFSGSGSGTDFTLTIS |
| | | amino acid | RLEPEDFAVYYCQQYGNSPMCSFGQGTKLEIK |
| | | sequence | |
| 364 | IMPI-071 | LCDR1 | QSVRGSF |
| 157 | IMPI-071 | LCDR2 | GAS |
| 360 | IMPI-071 | LCDR3 | QQYGNSPMCS |
| 411 | IMPI-072 | VH domain | CAGGTGCAACTGGTGGAGTCTGGGGGAGGCGTGGTCCAGCCTGGGAGGTCCCTGAGACTCTCCTGTGCAGCCTCTGG |
| | | nucleic | ATTCACCTTCAGTAGCTTTGGCATGCACTGGGTCCGCCAGGCTCCAGGCAAGGGGCTGGAGTGGGTGGCAGTTATAT |
| | | acid | CATATGATGGAAGTAGTAAAGACTATGCAGACTCCGTGAAGGGCCGATTCACCATCTCCAGAGACAATTCCAAGAAC |
| | | sequence | ACGCTGTATCTGCAAATGAACAGCCTGGGAGCGGAGGACACGGCTGTGTATTACTGTGCGAAAGATGAGGGGGACTA |
| | | | CGACGACTACTATTACGGTATGGACGTCTGGGGCCAAGGGACCACGGTCACCGTCTCCTCA |
| 412 | IMPI-072 | VH domain | QVQLVESGGGVVQPGRSLRLSCAASGFTFSSFGMHWVRQAPGKGLEWVAVISYDGSSKDYADSVKGRFTISRDNSKN |
| | | amino acid | TLYLQMNSLGAEDTAVYYCAKDEGDYDDYYYGMDVWGQGTTVTVSS |
| | | sequence | |
| 413 | IMPI-072 | HCDR1 | GFTFSSFG |
| 387 | IMPI-072 | HCDR2 | ISYDGSSK |
| 388 | IMPI-072 | HCDR3 | AKDEGDYDDYYYGMDV |
| 414 | IMPI-072 | VL domain | GAAATTGTGTTGACGCAGTCTCCAGGCACCCTGTCTTTGTCTCCAGGGGAAAGAGCCACCCTCTCCTGCAGGGCCAG |
| | | nucleic | TCAGAGTCTTAGCAGCAGATACTTGGCCTGGTACCACCAGAAACCTGGCCAGGCTCCCAGGCTCTTCATCTATGGTG |
| | | acid | CATCCATCAGGGCCACTGGCATCCCAGACAGGTTCAGTGGCAGTGGGTCTGGGACGGACTTCACTCTCACCATCAGC |
| | | sequence | GGACTGGAGCCTGAAGATTTTGCAGTGTATTACTGTCAGCAGTATGGTAGTTCAATCACTTTCGGCAGAGGGACCAA |
| | | | GGTGGAGATCAAA |
| 415 | IMPI-072 | VL domain | EIVLTQSPGTLSLSPGERATLSCRASQSLSSRYLAWYHQKPGQAPRLFIYGASIRATGIPDRFSGSGSGTDFTLTIS |
| | | amino acid | GLEPEDFAVYYCQQYGSSITFGRGTKVEIK |
| | | sequence | |
| 391 | IMPI-072 | LCDR1 | QSLSSRY |
| 157 | IMPI-072 | LCDR2 | GAS |
| 416 | IMPI-072 | LCDR3 | QQYGSSIT |

| SEQ ID | Clone | | |
|---|---|---|---|
| NO | ID | Description | Sequence |
| 486 | YANG-1101 | VH domain | CAGCTGCAGCTGCAGGAGTCGGGCCCAGGACTGGTGAAGCCTTC |
| | | nucleic | GGAGACCCTGTCCCTCACCTGCACTGTCTCTGGTGGCTCCATCA |
| | | acid | GCAGTAGTAGTTACTACTGGGGCTGGATCCGCCAGCCCCCAGGG |
| | | sequence | AAGGGGCTGGAGTGGATTGGGAGTATCTATTATAGTGGGAGCAT |
| | | | TTACTACAACCCGTCCCTCAAGAGTCGAGTCACCATATCCGTTG |
| | | | ACACGTCCAAGAACCAGTTCTCCCTGAAGCTGAGCTCTGTGACC |
| | | | GCCGCAGACACGGCTGTGTATTACTGTGCGAGCTGGTTCGGGGA |
| | | | GTTCTTGAAAGCCGATGCTTTTGATATCTGGGGCCAAGGGACAA |
| | | | TGGTCACCGTCTCTTCA |
| 487 | YANG-1101 | VH domain | QLQLQESGPGLVKPSETLSLTCTVSGGSISSSSYYWGWIRQPPG |
| | | amino | KGLEWIGSIYYSGSIYYNPSLKSRVTISVDTSKNQFSLKLSSVT |
| | | acid | AADTAVYYCASWFGEFLKADAFDIWGQGTMVTVSS |
| | | sequence | |
| 488 | YANG-1101 | HCDR1 | GGSISSSSYY |
| 489 | YANG-1101 | HCDR2 | IYYSGSI |
| 490 | YANG-1101 | HCDR3 | ASWFGEFLKADAFDI |
| 491 | YANG-1101 | VL domain | CAGTCTGCCCTGACTCAGCCTGCCTCCGTGTCTGGGTCTCCTGG |
| | | nucleic | ACAGTCGATCACCATCTCCTGCACTGGAACCAGCAGTGATGTTG |
| | | acid | GTGGTTATAGCTATGTCTCCTGGTACCAACAGCACCCAGGCAAA |
| | | sequence | GCCCCCAAACTCATGATTTATGATGTCAGTAAGCGGCCCTCAGG |
| | | | GGTTTCTAATCGCTTCTCTGGCTCCAAGTCTGGCAACACGGCCT |
| | | | CCCTGACAATCTCTGGGCTCCAGGCTGAGGACGAGGCTGATTAT |
| | | | TACTGCTGCTCATATGCAGGTGGTAGCACTTTCGTGGTATTCGG |
| | | | CGGAGGGACCAAGCTGACCGTCCTA |
| 492 | YANG-1101 | VL domain | QSALTQPASVSGSPGQSITISCTGTSSDVGGYSYVSWYQQHPGK |
| | | amino | APKLMIYDVSKRPSGVSNRFSGSKSGNTASLTISGLQAEDEADY |
| | | acid | YCCSYAGGSTFVVFGGGTKLTVL |
| | | sequence | |
| 493 | YANG-1101 | LCDR1 | SSDVGGYSY |
| 203 | YANG-1101 | LCDR2 | DVS |
| 494 | YANG-1101 | LCDR3 | CSYAGGSTFVV |
| 495 | YANG-1102 | VH domain | CAGGTGCAGCTGCAGGAGTCGGGCCCAGGACTGGTGAAGCCTTC |
| | | nucleic | GGGGACCCTGTCCCTCACCTGCGCTGTCTCTGGTGGCTCCATCA |
| | | acid | GCACAACTAATTGGTGGAGTTGGGTCCGCCAGTCCCCAGGGAGG |
| | | sequence | GGGCTGGAGTGGATTGGGGAAATCTTTCATATTGGATATACCAA |
| | | | CTACAACCCGTCCCTCAAGAGTCGAGTCACCATATCAGTAGACA |
| | | | AGTCCAAGAACCAATTCTCCCTGAAGCTGAATTCCGTGACCGTC |
| | | | GCGGACACGGCCGTGTATTACTGTGCGAGAAGAGTGGTCATGGA |
| | | | CACAGCTATGGCCCACTTTGACTGCTGGGGCCAGGGAACCCTGG |
| | | | TCACCGTCTCCTCA |
| 496 | YANG-1102 | VH domain | QVQLQESGPGLVKPSGTLSLTCAVSGGSISTTNWWSWVRQSPGR |
| | | amino | GLEWIGEIFHIGYTNYNPSLKSRVTISVDKSKNQFSLKLNSVTV |
| | | acid | ADTAVYYCARRVVMDTAMAHFDCWGQGTLVTVSS |
| | | sequence | |
| 497 | YANG-1102 | HCDR1 | GGSISTTNW |
| 498 | YANG-1102 | HCDR2 | IFHIGYT |
| 499 | YANG-1102 | HCDR3 | ARRVVMDTAMAHFDC |
| 500 | YANG-1102 | VL domain | CAGTCTGTGCTGACGCAGCCGCCCTCAGTGTCTGGGGCCCCAGG |
| | | nucleic | GCAGAGGGTCACCATCTCCTGCACTGGGAGCAGCTCCAACATCG |
| | | acid | GGGCAGGTTATGATGTACACTGGTACCAGCACCTTCCAGGAACA |
| | | sequence | GCCCCCAAACTCCTCATCTATATTAACATCAATCGGCCCTCAGG |
| | | | GGTCCCTGACCGATTCTCTGGCTCCAAGTCTGGCACCTCAGCCT |
| | | | CCCTGGTCATCGCTGGGCTCCAGGCTGAAGATGGGGCTGATTAT |
| | | | TACTGCCAGTCCTATGACAGCAGTCTGAGTGGTTGGGTGTTCGG |
| | | | CGGGGGGACCAGGCTGACCGTCCTA |
| 501 | YANG-1102 | VL domain | QSVLTQPPSVSGAPGQRVTISCTGSSSNIGAGYDVHWYQHLPGT |
| | | amino | APKLLIYININRPSGVPDRFSGSKSGTSASLVIAGLQAEDGADY |
| | | acid | YCQSYDSSLSGWVFGGGTRLTVL |
| | | sequence | |
| 502 | YANG-1102 | LCDR1 | SSNIGAGYD |
| 503 | YANG-1102 | LCDR2 | INI |
| 504 | YANG-1102 | LCDR3 | QSYDSSLSGWV |
| 505 | YANG-1103 | VH domain | GAGGTGCAGATGGTGGAGTCTGGAGGAGGCTTGATCCAGCCGGG |
| | | nucleic | GGGGTCCCTGAGACTCTCCTGTGCAGCCTCTGGGCTCACCGTCA |
| | | acid | GTAGTAATTACATGAGCTGGGTCCGCCAGGCTCCAGGGAAGGGG |
| | | sequence | CTGGAGTGGGTCTCAGTTATTTATAGCGGTGGTAGCACATTCTA |
| | | | CGCAGACTCCGTGAAGGACCGATTCACCATCTCCAGGGACAATT |
| | | | CCAAGAACACGCTGTATCTTCAAATGAACAGCCTGAGAGCCGAA |
| | | | GACACGGCCGTATATTACTGTGCGCGAGAAAACTGGAACTACGT |
| | | | TTTTGACTGCTGGGGCCAGGGAACCCTGGTCACCGTCTCCTCA |
| 506 | YANG-1103 | VH domain | EVQMVESGGGLIQPGGSLRLSCAASGLTVSSNYMSWVRQAPGKG |
| | | amino | LEWVSVIYSGGSTFYADSVKDRFTISRDNSKNTLYLQMNSLRAE |
| | | acid | DTAVYYCARENWNYVEDCWGQGTLVTVSS |
| | | sequence | |
| 172 | YANG-1103 | HCDR1 | GLTVSSNY |
| 14 | YANG-1103 | HCDR2 | IYSGGST |
| 507 | YANG-1103 | HCDR3 | ARENWNYVEDC |
| 508 | YANG-1103 | VL domain | GACATCCAGTTGACCCAGTCTCCATCCTTCCTGTCTGCATCTGT |
| | | nucleic | AGGAGACAGAGTCACCATCACTTGCTGGGCCAGTCAGGGCATTA |
| | | acid | GCAGTTATTTAGCCTGGTATCAGCAAAAACCAGGGAAAGCCCCT |
| | | sequence | AAGCTCCTGATCTATGCTGCATCCACTTTGCAAAGTGGGGTCCC |
| | | | ATCAAGGTTCAGCGGCAGTGGATCTGGGACAGAATTCACTCTCA |
| | | | CAATCAGCAGCCTGCAGCCTGAAGATTTTGCAACTTATTACTGT |
| | | | CAACAGCTTAATAGTCACCCTATCATCTTCGGCCAAGGGACACG |
| | | | ACTGGAGATTAAA |
| 509 | YANG-1103 | VL domain | DIQLTQSPSFLSASVGDRVTITCWASQGISSYLAWYQQKPGKAP |
| | | amino | KLLIYAASTLQSGVPSRFSGSGSGTEFTLTISSLQPEDFATYYC |
| | | acid | QQLNSHPIIFGQGTRLEIK |
| | | sequence | |
| 8 | YANG-1103 | LCDR1 | QGISSY |
| 18 | YANG-1103 | LCDR2 | AAS |
| 510 | YANG-1103 | LCDR3 | QQLNSHPII |
| 511 | YANG-1105 | VH domain | GAGGTGCAGGTGGTAGAATCTGGAGGAGGCTTGATCCAGCCGGG |
| | | nucleic | GGGGTCCCTGAGACTCTCCTGTGCAGCCTCTGGAATCACCGTCA |
| | | acid | GTAGAAACTACATGAACTGGGTCCGCCAGGCTCCAGGGAAGGGG |
| | | sequence | CTGGAGTGGGTCTCAGTTATTTATAGCGGTGGTAGCACATTCTA |
| | | | CGCAGACTCCGTGAAGGGCCGATTCACCATCTCCAGAGACAATT |
| | | | CCAAGAACACGCTGTATCTTCAAATGAACAGCCTGAGAGCCGAT |
| | | | GACACGGGCGTGTATTACTGTGCGAGAGAAGGGTACGGTATGGA |
| | | | CGTCTGGGGCCAAGGGACCACGGTCACCGTCTCCTCA |
| 512 | YANG-1105 | VH domain | EVQVVESGGGLIQPGGSLRLSCAASGITVSRNYMNWVRQAPGKG |
| | | amino | LEWVSVIYSGGSTFYADSVKGRFTISRDNSKNTLYLQMNSLRAD |
| | | acid | DTGVYYCAREGYGMDVWGQGTTVTVSS |
| | | sequence | |
| 513 | YANG-1105 | HCDR1 | GITVSRNY |
| 14 | YANG-1105 | HCDR2 | IYSGGST |
| 514 | YANG-1105 | HCDR3 | AREGYGMDV |
| 515 | YANG-1105 | VL domain | GACATCCAGTTGACCCAGTCTCCATCCTTCCTGTCTGCATCTGT |
| | | nucleic | AGGAGACAGAGTCACCATCACTTGCTGGGCCAGTCAGGGCATTA |
| | | acid | GCAGTTATTTAGCCTGGTATCAGCAAAAACCAGGGAAAGCCCCT |
| | | sequence | AAGCTCCTGATTTATTCTGCATCCACTTTGCAAAGTGGGGTCCC |
| | | | ATCAAGGTTCAGCGGCAGTGGATCTGGGACAGAATTCACTCTCA |
| | | | CAATCAACAGCCTGCAGCCTGAAGATTTTGCAACTTATTATTGT |
| | | | CAACAGCTTAATAGTCACCCGTGCAGTTTTGGCCAGGGGACCAA |
| | | | GCTGGAGATCAAA |
| 516 | YANG-1105 | VL domain | DIQLTQSPSFLSASVGDRVTITCWASQGISSYLAWYQQKPGKAP |
| | | amino | KLLIYSASTLQSGVPSRFSGSGSGTEFTLTINSLQPEDFATYYC |
| | | acid | QQLNSHPCSFGQGTKLEIK |
| | | sequence | |
| 8 | YANG-1105 | LCDR1 | QGISSY |
| 517 | YANG-1105 | LCDR2 | SAS |
| 518 | YANG-1105 | LCDR3 | QQLNSHPCS |
| 519 | YANG-1106 | VH domain | GAGGTGCAGCTGGTGGAGTCTGGAGGAGGCCTGATCCAGCCTGG |
| | | nucleic | GGGGTCCCTGAGACTCTCCTGTGCAGCCTCTGAATTCATCGTCA |
| | | acid | GTCGCAACTACATGAGTTGGGTCCGCCAGGCTCCAGGGAAGGGG |
| | | sequence | CTGGAATGGGTCTCAGTTATTTATAGCGGTGGTAGCACATTCTA |
| | | | CGCAGACTCCGTGAGGGGCCGATTCACCATCTCCAGAGACAATT |
| | | | CCAAAAACACGCTGTATCTTCAAATGAACAGCCTGAGAGCCGAG |
| | | | GACACGGCCGTGTATTACTGTGCGAGAGACTACGGTGACCAGTA |
| | | | CTTTGACTACTGGGGCCAGGGAACCCTGGTCACCGTCTCCTCA |
| 520 | YANG-1106 | VH domain | EVQLVESGGGLIQPGGSLRLSCAASEFIVSRNYMSWVRQAPGKG |
| | | amino | LEWVSVIYSGGSTFYADSVRGRFTISRDNSKNTLYLQMNSLRAE |
| | | acid | DTAVYYCARDYGDQYFDYWGQGTLVTVSS |
| | | sequence | |
| 521 | YANG-1106 | HCDR1 | EFIVSRNY |
| 14 | YANG-1106 | HCDR2 | IYSGGST |
| 522 | YANG-1106 | HCDR3 | ARDYGDQYFDY |
| 523 | YANG-1106 | VL domain | GAAATGGTGATGACGCAGTCTCCAGCCACCCTGTCTGTGTCTCC |
| | | nucleic | AGGGGAAAAAGCCACCCTCTCCTGCAGGGCCAGTCAGACTGTTA |
| | | acid | GCACCAACTTAGCCTGGTACCAACAGAAACCTGGCCAGTCTCCC |
| | | sequence | AGGCTCCTCATCTATGGTGCATCCACCAGGGCCACTGGTATCCC |
| | | | AGCCAGGTTCAGTGGCAGTGGGTCTGGGACAGAGTTCACTCTCA |
| | | | CCATCAGCAGCCTGCAGTCTGAAGATTTTGCAATTTATTACTGT |
| | | | CAGCAATATGTTGACTGGCCTCGGACGTTCGGCCAAGGGACCAC |
| | | | GGTGGAAATCAAA |
| 524 | YANG-1106 | VL domain | EMVMTQSPATLSVSPGEKATLSCRASQTVSTNLAWYQQKPGQSP |
| | | amino | RLLIYGASTRATGIPARFSGSGSGTEFTLTISSLQSEDFAIYYC |
| | | acid | QQYVDWPRTFGQGTTVEIK |
| | | sequence | |
| 525 | YANG-1106 | LCDR1 | QTVSTN |
| 157 | YANG-1106 | LCDR2 | GAS |
| 526 | YANG-1106 | LCDR3 | QQYVDWPRT |
| 527 | YANG-1107 | VH domain | GAGGTGCAGATGGTGGAGTCTGGAGGAGGCTTGATCCAGTCTGG |
| | | nucleic | GGGGTCCCTGAGACTCTCCTGTGCAGCCTCTGGGCTCAGCGTCA |
| | | acid | GTAGCAACTACATGAGTTGGGTCCGCCAGGCTCCAGGGAAGGGG |
| | | sequence | CTGGAATGGGTCGCAGTTATTTATAGCGGTGGTAGTATATTCTA |
| | | | TGCAGACTCCGTGAAGGACCGATTCACCATCTCCAGGGACAATT |
| | | | CCAAGAACACGCTTTATCTTCAAATGAACAGCCTGAGAGCCGAG |
| | | | GACACGGCCGTATATTACTGTGCGAGAGAGAACTGGAACTACGT |
| | | | TTTTGACTGCTGGGGCCAGGGAACCCTGGTCACCGTCTCCTCA |
| 528 | YANG-1107 | VH domain | EVQMVESGGGLIQSGGSLRLSCAASGLSVSSNYMSWVRQAPGKG |
| | | amino | LEWVAVIYSGGSIFYADSVKDRETISRDNSKNTLYLQMNSLRAE |
| | | acid | DTAVYYCARENWNYVFDCWGQGTLVTVSS |
| | | sequence | |
| 529 | YANG-1107 | HCDR1 | GLSVSSNY |
| 530 | YANG-1107 | HCDR2 | IYSGGSI |
| 507 | YANG-1107 | HCDR3 | ARENWNYVFDC |
| 531 | YANG-1107 | VL domain | GACATCCAGTTGACCCAGTCTCCATCCTTCCTGTCTGCATCTGT |
| | | nucleic | TGGAGACAGAGTCACCATCACTTGCTGGGCCAGTCAGGGCATTA |
| | | acid | GCACTTATTTAGCCTGGTATCAGCAAAAACCAGGGAAAGCCCCT |
| | | sequence | AAGCTCCTGATCTATGCTGCATCCACTTTGCAAAGTGGGGTCCC |
| | | | ATCAAGGTTCAGCGGCAGTGGATCTGGGACAGAATTCACTCTCA |
| | | | CAATCAGCAGCCTGCAGCCTGAAGATTTTGCAACTTATTACTGT |
| | | | CAACAGCTTAGTAGTCACCCTATCATCTTCGGCCAAGGGACACG |
| | | | ACTGGAGATTAAA |
| 532 | YANG-1107 | VL domain | DIQLTQSPSFLSASVGDRVTITCWASQGISTYLAWYQQKPGKAP |
| | | amino | KLLIYAASTLQSGVPSRFSGSGSGTEFTLTISSLQPEDFATYYC |
| | | acid | QQLSSHPIIFGQGTRLEIK |
| | | sequence | |
| 176 | YANG-1107 | LCDR1 | QGISTY |
| 18 | YANG-1107 | LCDR2 | AAS |
| 533 | YANG-1107 | LCDR3 | QQLSSHPII |
| 534 | YANG-1108 | VH domain | CAGGTGCAGCTGGTGGAATCTGGGGGAGGCGTGGTCCACCCTGG |
| | | nucleic | GAGGTCCCTGAGACTCTCCTGTGTAGTCTCTGGATTCACCTTCA |
| | | acid | GTGGCTATGGCATGTACTGGGTCCGCCAGGCTCCAGGCAAGGGG |
| | | sequence | CTGGAGTGGGTGGCAGTCATATCAAAGGATGGAAGTGATAAATA |
| | | | CTATGCAGACTCCGTGAAGGGCCGATTCACCATTTCCAGAGACA |
| | | | ATTCCAAGAACACACTGAATCTGCAAATGAACAGCCTGAGAGCT |
| | | | GAGGACACGGCTGTGTTTTACTGTGCGAAAGAAAGGACTTTCCA |
| | | | AGGTTCGGGGAGTTATTATAACAACTACTTTTATTATGGTATGG |
| | | | ACGTCTGGGGCCAAGGGACCACGGTCACCGTCTCCTCA |
| 535 | YANG-1108 | VH domain | QVQLVESGGGVVHPGRSLRLSCVVSGFTFSGYGMYWVRQAPGKG |
| | | amino | LEWVAVISKDGSDKYYADSVKGRFTISRDNSKNTLNLQMNSLRA |
| | | acid | EDTAVFYCAKERTFQGSGSYYNNYFYYGMDVWGQGTTVTVSS |
| | | sequence | |
| 536 | YANG-1108 | HCDR1 | GFTFSGYG |
| 537 | YANG-1108 | HCDR2 | ISKDGSDK |
| 538 | YANG-1108 | HCDR3 | AKERTFQGSGSYYNNYFYYGMDV |
| 539 | YANG-1108 | VL domain | GCCATCCAGTTGACCCAGTCTCCATCCTCCCTGTCTGCATCTGT |
| | | nucleic | AGGAGACAGAGTCACCATCACTTGCCGGGCAAGTCAGGGCATTA |
| | | acid | GCAGTGCTTTAGCCTGGTATCAGCAGAAACCAGGGAAAGCTCCT |
| | | sequence | AACCTCCTGATCTATGATGCCTCCAGTTTGGAAAGTGGGGTCCC |
| | | | ATCAAGGTTCAGCGGCAGTGGATTTGGGACAGATTTCACTCTCA |
| | | | CCATCAACAGCCTGCAGCCTGAAGATTTTGCAAGTTATTATTGT |
| | | | CAACAGTTTAAGAGTTATCCGCTCACTTTCGGCGGAGGGACCAA |
| | | | GGTGGAGATCAAG |
| 540 | YANG-1108 | VL domain | AIQLTQSPSSLSASVGDRVTITCRASQGISSALAWYQQKPGKAP |
| | | amino | NLLIYDASSLESGVPSRFSGSGFGTDFTLTINSLQPEDFASYYC |
| | | acid | QQFKSYPLTFGGGTKVEIK |
| | | sequence | |
| 541 | YANG-1108 | LCDR1 | QGISSA |
| 28 | YANG-1108 | LCDR2 | DAS |
| 542 | YANG-1108 | LCDR3 | QQFKSYPLT |
| 543 | YANG-1109 | VH domain | GAGGTGCAGCTGGTGGAGTCTGGAGGAGGCTTGATCCAGCCTGG |
| | | nucleic | GGGGTCCCTGAGACTCTCCTGTGGAGTCTCAGGACTCACCGTCA |
| | | acid | GTAGAAACTATATGAATTGGGTCCGCCAGGCTCCAGGGAAGGGG |
| | | sequence | CTGGAGTGGGTCTCAGTTATTTATAGCGGTGGTAGCACATTCTA |
| | | | CGCAGACTCCGTGAAGGGCCGATTCACCATCTCCAGAGACAACT |
| | | | CCAAAAACACGCTGTATCTTCAAATGATCAGCCTGAGAGCCGAG |
| | | | GACTCGGGCGTGTATTACTGTGCGCGAGAAGGATTTGGTATGGA |
| | | | CGTCTGGGGCCAAGGGACCACGGTCACCGTCTCCTCA |
| 544 | YANG-1109 | VH domain | EVQLVESGGGLIQPGGSLRLSCGVSGLTVSRNYMNWVRQAPGKG |
| | | amino | LEWVSVIYSGGSTFYADSVKGRFTISRDNSKNTLYLQMISLRAE |
| | | acid | DSGVYYCAREGFGMDVWGQGTTVTVSS |
| | | sequence | |
| 545 | YANG-1109 | HCDR1 | GLTVSRNY |
| 14 | YANG-1109 | HCDR2 | IYSGGST |
| 546 | YANG-1109 | HCDR3 | AREGFGMDV |
| 547 | YANG-1109 | VL domain | GACATCCAGTTGACCCAGTCTCCATCCTTCCTGTCTGCATCTGT |
| | | nucleic | AGGAGACAGAGTCACCATCACTTGCTGGGCCAGTCAGGGCATTA |
| | | acid | GCAATTATTTAGCCTGGTATCAGCAAAAACCAGGGAAAGCCCCT |
| | | sequence | AAGCTCCTGATCTATTCTGCATCCACTTTGCAAAGTGGGGTCCC |
| | | | ATCAAGGTTCAGCGGCAGTGGATCTGGGACAGAATTCACTCTCA |
| | | | CAATCAGCAACCTGCAGCCTGCAGATATTGCAACTTATTACTGT |
| | | | CAACTCCTTAATAGTCATCCGTGCAGTTTTGGCCAGGGGACCAA |
| | | | GCTGGAGATCAAA |
| 548 | YANG-1109 | VL domain | DIQLTQSPSFLSASVGDRVTITCWASQGISNYLAWYQQKPGKAP |
| | | amino | KLLIYSASTLQSGVPSRFSGSGSGTEFTLTISNLQPADIATYYC |
| | | acid | QLLNSHPCSFGQGTKLEIK |
| | | sequence | |
| 549 | YANG-1109 | LCDR1 | QGISNY |
| 517 | YANG-1109 | LCDR2 | SAS |
| 550 | YANG-1109 | LCDR3 | QLLNSHPCS |
| 551 | YANG-1110 | VH domain | CAGGTGCAGCTGGCGGAGTCTGGGGGAGGCGTGGTCCAGCCTGG |
| | | nucleic | GAGGTCCCTGAGACTCTCCTGTGTAGTCTCTGGATTCACCTTCA |
| | | acid | GTAACTATGGCATGCACTGGGTCCGCCAGGCTCCAGGCAAGGGC |
| | | sequence | CTGGAGTGGGTGGTATTTATATCAAATGATGGAAGTAATGAAGA |
| | | | CTTTGTAGACTCCGTGAAGGGCCGATTCACCATCTCCAGAGACA |
| | | | ATTCCAAGAACACGCTGTATCTGCAAATGAACAGCCTGAGAGCT |
| | | | GAGGACACGGCTGTGTATTACTGTGCGAAAGGAGGGTATTTCTA |
| | | | TGGTTCGGGGAATTATTACTACTACTACGGTATGGACGTCTGGG |
| | | | GCCAAGGGACCACGGTCACCGTCTCCTCA |
| 552 | YANG-1110 | VH domain | QVQLAESGGGVVQPGRSLRLSCVVSGFTFSNYGMHWVRQAPGKG |
| | | amino | LEWVVFISNDGSNEDFVDSVKGRFTISRDNSKNTLYLQMNSLRA |
| | | acid | EDTAVYYCAKGGYFYGSGNYYYYYGMDVWGQGTTVTVSS |
| | | sequence | |
| 553 | YANG-1110 | HCDR1 | GFTFSNYG |
| 554 | YANG-1110 | HCDR2 | ISNDGSNE |
| 555 | YANG-1110 | HCDR3 | AKGGYFYGSGNYYYYYGMDV |
| 556 | YANG-1110 | VL domain | CAGCCTGTGCTGACTCAATCATCCTCTGCCTCTGCTTCCCTGGG |
| | | nucleic | ATCCTCGGTCAAGCTCACCTGCACTCTGAGCAGTGTGCACAGTA |
| | | acid | ACCACATCATCGCATGGCATCAGCAGCAGCCAGGGAAGGCCCCT |
| | | sequence | CGGTACTTGATGAAGCTTGAAGGTAGTGGAAGGTACAGTAAGGG |
| | | | GAGCGGAGTTCCTGATCGCTTCTCAGGCTCCAGCTCTGAGGCTG |
| | | | ACCGCTACCTCACCATCTCCAACCTCCAGTCTGAGGATGAGGCT |
| | | | GATTATTACTGTGAGACCTGGGACAATAATACTTATGTCTTCGG |
| | | | ATCTGGGACCAAAGTCACCGTCCTA |
| 557 | YANG-1110 | VL domain | QPVLTQSSSASASLGSSVKLTCTLSSVHSNHIIAWHQQQPGKAP |
| | | amino | RYLMKLEGSGRYSKGSGVPDRFSGSSSEADRYLTISNLQSEDEA |
| | | acid | DYYCETWDNNTYVFGSGTKVTVL |
| | | sequence | |
| 558 | YANG-1110 | LCDR1 | SVHSNHI |
| 559 | YANG-1110 | LCDR2 | LEGSGRY |
| 560 | YANG-1110 | LCDR3 | ETWDNNTYV |
| 561 | YANG-1111 | VH domain | GAGGTGCAGCTGGTGGAGTCTGGGGGAGGCTTGATACAGCCTGG |
| | | nucleic | GGGGTCCCTGAGACTCTCCTGTGCAGCCTCTGGATTCACCTTCA |
| | | acid | GTAGCTATAGCATAAACTGGGTCCGCCAGGCTCCAGGGAAGGGG |
| | | sequence | CTGGAGTGGGTTTCATTCATTAGTGGTAGTAGTACTACCATATA |
| | | | CTACGCAGACTCTGTGAAGGGCCGATTCACCATCTCCAGAGACA |
| | | | GTGCCAAGAACTCACTGTATCTGCAAATGAACAGCCTGAGAGAC |
| | | | GAGGACACGGCTGTGTATTACTGTGCGAGAGGCCTCCGATCGAG |
| | | | TATAGCACCTCGTCCGGACTACTTTGACTCCTGGGGCCAGGGAA |
| | | | TTTTGGTCACCGTCTCCTCA |
| 562 | YANG-1111 | VH domain | EVQLVESGGGLIQPGGSLRLSCAASGFTFSSYSINWVRQAPGKG |
| | | amino | LEWVSFISGSSTTIYYADSVKGRFTISRDSAKNSLYLQMNSLRD |
| | | acid | EDTAVYYCARGLRSSIAPRPDYFDSWGQGILVTVSS |
| | | sequence | |
| 563 | YANG-1111 | HCDR1 | GFTFSSYS |
| 564 | YANG-1111 | HCDR2 | ISGSSTTI |
| 565 | YANG-1111 | HCDR3 | ARGLRSSIAPRPDYFDS |
| 566 | YANG-1111 | VL domain | TCCTATGTACTGACTCAGCCACCCTCAGTGTCAGTGGCCCCAGG |
| | | nucleic | AAAGACGGCCAGGATTACCTGTGGGGGAAACAACATTGGAAGTA |
| | | acid | AAGGTGTACACTGGTACCAGCAGAAGCCAGGCCAGGCCCCTGTA |
| | | sequence | CTGGTCATCTATTATGATAGCGACCGGCCCTCAGGGATCCCTGA |
| | | | GCGATTCTCTGGCTCCAACTCTGGGAACACGGCCACCCTGACCA |
| | | | TCAGCAGGGTCGAAGCCGGGGATGAGGCCGACTATTCCTGTCAG |
| | | | GTGTGGGATAGTAGTAGTGATCATCCGGTATTCGGCGGAGGGAC |
| | | | CAAGCTGACCGTCCAA |
| 567 | YANG-1111 | VL domain | SYVLTQPPSVSVAPGKTARITCGGNNIGSKGVHWYQQKPGQAPV |
| | | amino | LVIYYDSDRPSGIPERFSGSNSGNTATLTISRVEAGDEADYSCQ |
| | | acid | VWDSSSDHPVFGGGTKLTVQ |
| | | sequence | |
| 2364 | YANG-1111 | LCDR1 | NIGSKG |
| 568 | YANG-1111 | LCDR2 | YDS |
| 569 | YANG-1111 | LCDR3 | QVWDSSSDHPV |
| 570 | YANG-1112 | VH domain | CAGATCACCTTGAAGGAGTCTGGTCCTACGCTGGTGAAACCCAC |
| | | nucleic | ACAGACCCTCACGCTGACCTGCACCTTCTCTGGGTTCTCACTCA |
| | | acid | GCACTGGTGGAGTGGCTGTGGGCTGGATCCGTCAGCCCCCAGGA |
| | | sequence | AAGGCCCTGGAGTGGCTTGCAATCATTTATTGGGATGATGATAA |
| | | | GCGTTACAGCCCATCTCTGAAGAGCAGGCTCACCATCACCAAGG |
| | | | ACACCTCCAAAAACCAGGTGGTCCTTACAATGACCAACATGGAC |
| | | | CCTGTGGACACAGCCACATATTACTGTGCACACTGGGGAAAAGA |
| | | | TTCTTTTGATATCTGGGGCCAAGGGACAATGGTCACCGTCTCTT |
| | | | CA |
| 571 | YANG-1112 | VH domain | QITLKESGPTLVKPTQTLTLTCTFSGFSLSTGGVAVGWIRQPPG |
| | | amino | KALEWLAIIYWDDDKRYSPSLKSRLTITKDTSKNQVVLTMTNMD |
| | | acid | PVDTATYYCAHWGKDSFDIWGQGTMVTVSS |
| | | sequence | |
| 572 | YANG-1112 | HCDR1 | GFSLSTGGVA |
| 573 | YANG-1112 | HCDR2 | IYWDDDK |
| 574 | YANG-1112 | HCDR3 | AHWGKDSFDI |
| 575 | YANG-1112 | VL domain | TCCTATGAGCTGACACAGCCACCCTCGGTGTCAGTGTCCCCAGG |
| | | nucleic | ACAAACGGCCAGGATCACCTGCTCTGGAGATGCATTGCCAAGAA |
| | | acid | AATATGCTTATTGGTACCAGCAGAAGTCAGGCCAGGCCCCTGTG |
| | | sequence | CTGGTCATCTATGAGGACAATAACCGACCCTCCGGGATCCCTGA |
| | | | GAGATTCTCTGGCTCCAGCTCAGGGACAACGGCCACCTTGACTG |
| | | | TCAGTGGGGCCCAGGTGGAAGATGAAGCTGACTACTACTGTTAC |
| | | | TCAACAGACACCAGTGGTTATGTGGTATTCGGCGGAGGGACCAA |
| | | | GTTGACCGTCCTA |
| 576 | YANG-1112 | VL domain | SYELTQPPSVSVSPGQTARITCSGDALPRKYAYWYQQKSGQAPV |
| | | amino | LVIYEDNNRPSGIPERFSGSSSGTTATLTVSGAQVEDEADYYCY |
| | | acid | STDTSGYVVFGGGTKLTVL |
| | | sequence | |
| 577 | YANG-1112 | LCDR1 | ALPRKY |
| 578 | YANG-1112 | LCDR2 | EDN |
| 579 | YANG-1112 | LCDR3 | YSTDTSGYVV |
| 580 | YANG-1112a | VH domain | CAGATCACCTTGAAGGAGTCTGGTCCTACGCTGGTGAAACCCAC |
| | | nucleic | ACAGACCCTCACGGTGACCTGCACCTTCTCTGGGTTCTCACTCA |
| | | acid | CCACTGGTGGAGAGGCTGTGGGCTGGATCCGTCAGCCCCCAGGA |
| | | sequence | AAGGCCCTGGAGTGGCTTGCAATCATTTATTGGGATGATGATAA |
| | | | GCGTTACAGCCCATCTCTGAAGAGCAGGCTCACCATCACCAAGG |
| | | | ACACCTCCAGAAACCAGGTGGTCCTTATAATGACCAACATGGAC |
| | | | CCTATGGACACAGCCACATATTACTGTGCACACTGGGGAAAAGA |
| | | | TTCTTTTGATATCTGGGGCCAAGGGACAATGGTCACCGTCTCTT |
| | | | CA |
| 581 | YANG-1112a | VH domain | QITLKESGPTLVKPTQTLTVTCTFSGFSLTTGGEAVGWIRQPPG |
| | | amino | KALEWLAIIYWDDDKRYSPSLKSRLTITKDTSRNQVVLIMTNMD |
| | | acid | PMDTATYYCAHWGKDSFDIWGQGTMVTVSS |
| | | sequence | |
| 582 | YANG-1112a | HCDR1 | GFSLTTGGEA |
| 583 | YANG-1112a | HCDR2 | IYWDDDK |
| 584 | YANG-1112a | HCDR3 | AHWGKDSFDI |
| 585 | YANG-1112a | VL domain | TCCCATGAGCTGACACAGCCACCCTCGGTGTCAGTGTCCCCAGG |
| | | nucleic | ACAAACGGCCAGGATCACCTGCTCTGGAGATGAATTGTCAAGAA |
| | | acid | AATATGCTTATTGGTACCAGCAGAAGTCAGGCCAGGCCCCTGTG |
| | | sequence | CTGGTCATCTATGAGGACAACAAACGACCCTCCGGGATCCCTGA |
| | | | GAGATTCTCTGGCTCCAGCTCAGGGACAACGGCCACCTTGACTG |
| | | | TCAGTGGGGCCCAGGTGGACGATGAAGCTGACTACTACTGTTAC |
| | | | TCAACAGACACCAGTGGTTATGTGGTATTCGGCGGAGGGACCAA |
| | | | GTTGACCGTCCTA |
| 586 | YANG-1112a | VL domain | SHELTQPPSVSVSPGQTARITCSGDELSRKYAYWYQQKSGQAPV |
| | | amino | LVIYEDNKRPSGIPERFSGSSSGTTATLTVSGAQVDDEADYYCY |
| | | acid | STDTSGYVVFGGGTKLTVL |
| | | sequence | |
| 587 | YANG-1112a | LCDR1 | ELSRKY |
| 578 | YANG-1112a | LCDR2 | EDN |
| 588 | YANG-1112a | LCDR3 | YSTDTSGYVV |
| 589 | YANG-1112b | VH domain | CAGATCACCTTGAAGGAGTCTGGTCCTACGCTGGTGAAACCCAC |
| | | nucleic | ACAGACCCTCACGCTGACCTGCACCTTCTCTGGGTTCTCACTCA |
| | | acid | CCACTGCTGGAGCGGCTGTGGGCTGGATCCGTCAGCCCCCAGGA |
| | | sequence | AAGGCCCTGGAATGGCTTGCAATCATTTACTGGGATGATGATAA |
| | | | GCGTTACAGTCCATCTCTGAAGAACAGGCTCACCATCACCAAGG |
| | | | ACACCTCCAAAAACCAGGTTGTCCTTACAATGACCAACATGGAC |
| | | | CCTGTGGACACAGCCACATATTACTGTGCACACTGGGGAAAAGA |
| | | | TTCTTTTGATATCTGGGGCCAAGGGACAATGGTCACCGTCTCTT |
| | | | CA |
| 590 | YANG-1112b | VH domain | QITLKESGPTLVKPTQTLTLTCTFSGESLTTAGAAVGWIRQPPG |
| | | amino | KALEWLAIIYWDDDKRYSPSLKNRLTITKDTSKNQVVLTMTNMD |
| | | acid | PVDTATYYCAHWGKDSFDIWGQGTMVTVSS |
| | | sequence | |
| 591 | YANG-1112b | HCDR1 | GFSLTTAGAA |
| 592 | YANG-1112b | HCDR2 | IYWDDDK |
| 593 | YANG-1112b | HCDR3 | AHWGKDSFDI |
| 594 | YANG-1112b | VL domain | TCCTATGAGCTGACACAGCCACCCTCGGTGTCAGTGCCCCCAGG |
| | | nucleic | ACAAACGGCCAGGATCACCTGCTCTGGAGATGCATTGCCAACAA |
| | | acid | AATATGCTTATTGGTACCAGCAGAAGTCAGGCCAGGCCCCTGTG |
| | | sequence | CTGGTCATCTATGAGGACAACAAACGACCCTCCGGGATCCCTGA |
| | | | GAGATTCTCTGGCTCCAGCTCAGGGACAACGGCCACCTTGACTG |
| | | | TCAGTGGGGCCCAGGTGGAGGATGAAGCTGACTTCTACTGTTAT |
| | | | TCAACAGACACCAGTGGTTATGTAGTATTCGGCGGAGGGACCAA |
| | | | GTTGACCGTCCTA |
| 595 | YANG-1112b | VL domain | SYELTQPPSVSVPPGQTARITCSGDALPTKYAYWYQQKSGQAPV |
| | | amino | LVIYEDNKRPSGIPERFSGSSSGTTATLTVSGAQVEDEADFYCY |
| | | acid | STDTSGYVVFGGGTKLTVL |
| | | sequence | |
| 596 | YANG-1112b | LCDR1 | ALPTKY |
| 578 | YANG-1112b | LCDR2 | EDN |
| 597 | YANG-1112b | LCDR3 | YSTDTSGYVV |
| 598 | YANG-1112c | VH domain | CAGATCACCTTGAAGGAGTCTGGTCCTACGCTGGTGAAACCCAC |
| | | nucleic | ACAGACCCTCACGGTGACCTGCACCTTCTCTGGGTTCTCACTCA |
| | | acid | GCACTGGTGGAGAGGCTGTGGGCTGGATCCGTCAGCCCCCAGGA |
| | | sequence | AAGGCCCTGGAGTGGCTTGCAATCATTTATTGGGATGATGATAA |
| | | | GCGTTACAGCCCATCTCTGAAGAGTAGGCTCACCATCACCAAGG |
| | | | ACACCTCCAAAAACCAGGTGGTCCTTACAATGACCAACATGGAC |
| | | | CCTATGGACACAGCCACATATTACTGTGCACACTGGGGAAAAGA |
| | | | TTCTTTTGATATCTGGGGCCAAGGGACAATGGTCACCGTCTCTT |
| | | | CA |
| 599 | YANG-1112c | VH domain | QITLKESGPTLVKPTQTLTVTCTFSGFSLSTGGEAVGWIRQPPG |
| | | amino | KALEWLAIIYWDDDKRYSPSLKSRLTITKDTSKNQVVLTMTNMD |
| | | acid | PMDTATYYCAHWGKDSFDIWGQGTMVTVSS |
| | | sequence | |
| 600 | YANG-1112c | HCDR1 | GFSLSTGGEA |
| 601 | YANG-1112c | HCDR2 | IYWDDDK |
| 602 | YANG-1112c | HCDR3 | AHWGKDSFDI |
| 603 | YANG-1112c | VL domain | TCCCATGAGCTGACACAGCCACCCTCGGTGTCAGTGTCCCCAGG |
| | | nucleic | ACAAACGGCCAGGATCACCTGCTCTGGAGATGAATTGTCAAGAA |
| | | acid | AATATGCTTATTGGTACCAGCAGAAGTCAGGCCAGGCCCCTGTG |
| | | sequence | CTGGTCATCTATGAGGACAACAAACGACCCTCCGGGATCCCTGA |
| | | | GAGATTCTCTGGCTCCAGCTCAGGGACAACGGCCACCTTGACTG |
| | | | TCAGTGGGGCCCAGGTGGACGATGAAGCTGACTACTACTGTTAC |
| | | | TCAACAGACACCAGTGGTTATGTGGTATTCGGCGGAGGGACCAA |
| | | | GTTGACCGTCCTA |
| 504 | YANG-1112c | VL domain | SHELTQPPSVSVSPGQTARITCSGDELSRKYAYWYQQKSGQAPV |
| | | amino | LVIYEDNKRPSGIPERFSGSSSGTTATLTVSGAQVDDEADYYCY |
| | | acid | STDTSGYVVFGGGTKLTVL |
| | | sequence | |
| 605 | YANG-1112c | LCDR1 | ELSRKY |
| 578 | YANG-1112c | LCDR2 | EDN |
| 606 | YANG-1112c | LCDR3 | YSTDTSGYVV |
| 607 | YANG-1113 | VH domain | GAGGTGCAGCTGGTGGAGTCTGGGGGAGGCCTGGTCAAGCCTGG |
| | | nucleic | GGGGTCCCTGAGACTCTCCTGTGCAGCCTCTGGATTCACCTTCA |
| | | acid | GTAGCTATAGCATGAACTGGGTCCGCCAGGCTCCAGGGAAGGGG |
| | | sequence | CTGGAGTGGGTCTCATCCATTAGTACTGGTAGTAGTTACATATT |
| | | | CTACGCAGACTCAGTGAAGGGCCGATTCACCATGTCCAGAGACA |
| | | | ACGCCAAGAACTCACTGTATCTACAAATGAACAGCCTGAGAGCC |
| | | | GAAGACACAGCTGTGTATTACTGTGCGAAAACTGGGGATCTTCC |
| | | | TTTCTTTGACTACTGGGGCCAGGGAACCCCGGTCACCGTCTCCT |
| | | | CA |
| 608 | YANG-1113 | VH domain | EVQLVESGGGLVKPGGSLRLSCAASGFTFSSYSMNWVRQAPGKG |
| | | amino | LEWVSSISTGSSYIFYADSVKGRFTMSRDNAKNSLYLQMNSLRA |
| | | acid | EDTAVYYCAKTGDLPFFDYWGQGTPVTVSS |
| | | sequence | |
| 609 | YANG-1113 | HCDR1 | GFTFSSYS |
| 610 | YANG-1113 | HCDR2 | ISTGSSYI |
| 611 | YANG-1113 | HCDR3 | AKTGDLPFFDY |
| 612 | YANG-1113 | VL domain | CAGTCTGCCCTGACTCAGCCTGCCTCCGTGTCTGGGTCTCCTGG |
| | | nucleic | ACAGTCGATCACCATCTCCTGCACTGGAACCAGCAGTGACGTTG |
| | | acid | GTCGTTATAACTATGTCTCCTGGTACCAACAGCACCCAGGCAAA |
| | | sequence | GCCCCCAAACTCATGATTTATGAGGTCAGTAATCGGCCCTCAGG |
| | | | GGTTTCTAATCGCTTCTCTGGCTCCAAGTCTGGCAACACGGCCT |
| | | | CCCTGACCATCTCTGGGCTCCAGGCTGAGGACGAGGCTGATTAT |
| | | | TACTGCAGCTCATATACAAGCAGCAGCACTATGGTATTCGGCGG |
| | | | AGGGACCAAGTTGACTGTCTTA |
| 613 | YANG-1113 | VL domain | QSALTQPASVSGSPGQSITISCTGTSSDVGRYNYVSWYQQHPGK |
| | | amino | APKLMIYEVSNRPSGVSNRFSGSKSGNTASLTISGLQAEDEADY |
| | | acid | YCSSYTSSSTMVFGGGTKLTVL |
| | | sequence | |
| 614 | YANG-1113 | LCDR1 | SSDVGRYNY |
| 615 | YANG-1113 | LCDR2 | EVS |
| 616 | YANG-1113 | LCDR3 | SSYTSSSTMV |
| 617 | YANG-1114 | VH domain | GAGGTGCACCTGGTGGAGTCTGTGGGAGGCCTGGTCAAGCCGGG |
| | | nucleic | GGGGTCCCTGAGACTCTCCTGTGCAGCCTCTGGATTCACCTTCA |
| | | acid | GTAGCTATAGCATGAACTGGGTCCGCCAGGCTCCAGGGAAGGGG |
| | | sequence | CTGGAGTGGGTCTCATCCATTAGTACTGGGAGTAGTTACATATT |
| | | | CTACGCAGACTCAGTGAAGGGCCGATTCACCATCTCCAGAGACA |
| | | | ACGCCAAGAACTCACTGTATCTGCAAATGAACAGCCTGAGAGCC |
| | | | GAGGACACAGCTGTGTATTACTGTGCGAAAACTGGGGATCTTCC |
| | | | TTTCTTTGACTACTGGGGCCAGGGAACCCTGGTCACCGTCTCCT |
| | | | CA |
| 618 | YANG-1114 | VH domain | EVHLVESVGGLVKPGGSLRLSCAASGFTFSSYSMNWVRQAPGKG |
| | | amino | LEWVSSISTGSSYIFYADSVKGRFTISRDNAKNSLYLQMNSLRA |
| | | acid | EDTAVYYCAKTGDLPFFDYWGQGTLVTVSS |
| | | sequence | |
| 619 | YANG-1114 | HCDR1 | GFTFSSYS |
| 620 | YANG-1114 | HCDR2 | ISTGSSYI |
| 621 | YANG-1114 | HCDR3 | AKTGDLPFFDY |
| 622 | YANG-1114 | VL domain | CAGTCTGCCCTGACTCAGCCTGCCTCCGTGTCTGGGTCTCCTGG |
| | | nucleic | ACAGTCGATCACCATCTCCTGCACTGGAACCAGCAGTGACGTTG |
| | | acid | GTCGTTATAACTATGTCTCCTGGTACCAACAGCACCCAGGCAAA |
| | | sequence | GCCCCCAAACTCATGATTTATGAGGTCAGTAATCGGCCCTCAGG |
| | | | GGTTTCTAATCGCTTCTCTGGCTCCAAGTCTGGCAACACGGCCT |
| | | | CCCTGACCATCTCTGGGCTCCAGGCTGAGGACGAGGCTGATTAT |
| | | | TACTGCAGCTCATATACAAGCAGCAGCACTATGGTATTCGGCGG |
| | | | AGGGACCAAGCTGACCGTCCTA |
| 623 | YANG-1114 | VL domain | QSALTQPASVSGSPGQSITISCTGTSSDVGRYNYVSWYQQHPGK |
| | | amino | APKLMIYEVSNRPSGVSNRFSGSKSGNTASLTISGLQAEDEADY |
| | | acid | YCSSYTSSSTMVFGGGTKLTVL |
| | | sequence | |
| 624 | YANG-1114 | LCDR1 | SSDVGRYNY |
| 615 | YANG-1114 | LCDR2 | EVS |
| 616 | YANG-1114 | LCDR3 | SSYTSSSTMV |
| 2365 | YANG-1115 | VH domain | GAGGTGCAGCTGGTGGAGTCTGGGGGAGGCCTGGTCAAGCCTGG |
| | | nucleic | GGGGTCCCTGAGACTCTCCTGTGCAGCCTCTGGATTCACCTTCA |
| | | acid | GTAGCTATAGCATGAACTGGGTCCGCCAGGCTCCAGGGAAGGGG |
| | | sequence | CTGGAGTGGGTCTCGTCCATTAGTACTGGTAGTAGTTACATATT |
| | | | CTACGCAGACTCAGTGAAGGGCCGATTCACCATCTCCAGAGACA |
| | | | ACGCCAAGAACTCACTGTATCTGCAAATGAACAGCCTGAGAGCC |
| | | | GAGGACACAGCTGTATATTACTGTGCGAAAACTGGGGATCTTCC |
| | | | TTTCTTTGACTACTGGGGCCAGGGAACCCTGGTCACCGTCTCCT |
| | | | CA |
| 2366 | YANG-1115 | VH domain | EVQLVESGGGLVKPGGSLRLSCAASGFTFSSYSMNWVRQAPGKG |
| | | amino | LEWVSSISTGSSYIFYADSVKGRFTISRDNAKNSLYLQMNSLRA |
| | | acid | EDTAVYYCAKTGDLPFFDYWGQGTLVTVSS |
| | | sequence | |
| 619 | YANG-1115 | HCDR1 | GFTFSSYS |
| 620 | YANG-1115 | HCDR2 | ISTGSSYI |
| 621 | YANG-1115 | HCDR3 | AKTGDLPFFDY |
| 2367 | YANG-1115 | VL domain | CAGTCTGCCCTGACTCAGCCTGCCTCCGTGTCTGGGTCTCCTGG |
| | | nucleic | ACAGTCGATCACCATCTCCTGCACTGGAACCAGCAGTGACGTTG |
| | | acid | GTCGTTATAACTATGTCTCCTGGTACCAACAGCACCCAGGCAAA |
| | | sequence | GCCCCCAAACTCATGATTTATGAGGTCAGTAATCGGCCCTCAGG |
| | | | GGTTTCTAATCGCTTCTCTGGCTCCAAGTCTGGCAACACGGCCT |
| | | | CCCTGACCATCTCTGGGCTCCAGGCTGAGGACGAGGCTGATTAT |
| | | | TACTGCAGCTCATATACAAGCAGCAGCACTATGGTATTCGGCGG |
| | | | AGGGACCAAGCTGTCCGTCCTA |
| 2368 | YANG-1115 | VL domain | QSALTQPASVSGSPGQSITISCTGTSSDVGRYNYVSWYQQHPGK |
| | | amino | APKLMIYEVSNRPSGVSNRFSGSKSGNTASLTISGLQAEDEADY |
| | | acid | YCSSYTSSSTMVFGGGTKLSVL |
| | | sequence | |
| 624 | YANG-1115 | LCDR1 | SSDVGRYNY |
| 615 | YANG-1115 | LCDR2 | EVS |
| 625 | YANG-1115 | LCDR3 | SSYTSSSTMV |
| 626 | YANG-1116 | VH domain | GAGGTACAGCTGGTGGAGTCTGGGGGAGGCCTGGTCAAGCCTGG |
| | | nucleic | GGGGTCCCTGAGACTCTCCTGTGAAGCCTCTGGATTCAATTTCA |
| | | acid | GAAGCTATGCCCTGAACTGGGTCCGCCAGGCTCCAGGGAAGGGG |
| | | sequence | CTGGAGTGGGTCTCATCCATTAGTACTGGTAGTAGTTACATATT |
| | | | CTACGCAGACTCAGTGAAGGGCCGATTCACCATCTCCAGAGACA |
| | | | ACGCCAAGAACTCACTGTCTCTGCAAATGAACAGCCTGAGAGCC |
| | | | GAGGACACAGCTGTGTATTACTGTGCGAAAACTGGGGATCTTCC |
| | | | TTTCTTTGACTACTGGGGCCAGGGAACCCTGGTCACCGTCTCCT |
| | | | CA |
| 627 | YANG-1116 | VH domain | EVQLVESGGGLVKPGGSLRLSCEASGENFRSYALNWVRQAPGKG |
| | | amino | LEWVSSISTGSSYIFYADSVKGRFTISRDNAKNSLSLQMNSLRA |
| | | acid | EDTAVYYCAKTGDLPFFDYWGQGTLVTVSS |
| | | sequence | |
| 628 | YANG-1116 | HCDR1 | GENFRSYA |
| 629 | YANG-1116 | HCDR2 | ISTGSSYI |
| 630 | YANG-1116 | HCDR3 | AKTGDLPFFDY |
| 631 | YANG-1116 | VL domain | CAGTCTGCCCTGACTCAGCCTGCCTCCGTGTCTGGGTCTCCTGG |
| | | nucleic | ACAGTCGATCACCATCTCCTGCACTGGAACCAGCAGTGACGTTG |
| | | acid | GTCGTTATAACTATGTCTCCTGGTACCAACAGCACCCAGGCAAA |
| | | sequence | GCCCCCAAACTCATGATTTATGAGGTCAGTAATCGGCCCTCAGG |
| | | | GGTTTCTAATCGCTTCTCTGGCTCCAAGTCTGGCAACACGGCCT |
| | | | CCCTGACCATCTCTGGGCTCCAGGCTGAGGACGAGGCTGATTAT |
| | | | TACTGCATCTCATATACAAGCAGCAGCACTATGGTATTCGGCGG |
| | | | AGGGACCAAGCTGACCGTCCTA |
| 632 | YANG-1116 | VL domain | QSALTQPASVSGSPGQSITISCTGTSSDVGRYNYVSWYQQHPGK |
| | | amino | APKLMIYEVSNRPSGVSNRFSGSKSGNTASLTISGLQAEDEADY |
| | | acid | YCISYTSSSTMVFGGGTKLTVL |
| | | sequence | |
| 633 | YANG-1116 | LCDR1 | SSDVGRYNY |
| 615 | YANG-1116 | LCDR2 | EVS |
| 634 | YANG-1116 | LCDR3 | ISYTSSSTMV |
| 635 | YANG-1117 | VH domain | GAGGTGCAGCTGGTGGAGTCTGGGGGAGGCCTGGTCAAGCCTGG |
| | | nucleic | GGGGTCCCTGAGACTCTCCTGTGCAGCCTCTGGATTCACCTTCA |
| | | acid | GTAGCTATAGCGTGAACTGGGTCCGCCAGGCTCCAGGGAAGGGG |
| | | sequence | CTGGAGTGGGTCTCATCCATTAGTACTGGTAGTAGTTACATTTT |
| | | | CTACGCAGACTCAGTGAAGGGCCGATTCACCATCTCCAGAGACA |
| | | | ACGCCAAGAACTCACTGTATCTGCAAATGAACAGCCTGAGAGCC |
| | | | GAGGACACAGCTGTGTATTACTGTGTGAAAACTGGGGATCTTCC |
| | | | TTTCTTTGACTACTGGGGCCAGGGAACCCTGGTCACCGTCTCCT |
| | | | CA |
| 636 | YANG-1117 | VH domain | EVQLVESGGGLVKPGGSLRLSCAASGFTFSSYSVNWVRQAPGKG |
| | | amino | LEWVSSISTGSSYIFYADSVKGRFTISRDNAKNSLYLQMNSLRA |
| | | acid | EDTAVYYCVKTGDLPFFDYWGQGTLVTVSS |
| | | sequence | |
| 637 | YANG-1117 | HCDR1 | GFTFSSYS |
| 638 | YANG-1117 | HCDR2 | ISTGSSYI |
| 639 | YANG-1117 | HCDR3 | VKTGDLPFFDY |
| 640 | YANG-1117 | VL domain | CAGTCTGCCCTGACTCAGCCTGCCTCCGTGTCTGGGTCTCCTGG |
| | | nucleic | ACAGTCGATCACCATCTCCTGCACTGGAACCAGAAGTGACGTTG |
| | | acid | GTCGTTATAACTATGTCTCCTGGTACCAACAGCACCCAGGCAAA |
| | | sequence | GCCCCCAAACTCATGATTTATGAGGTCACTAATCGGCCCTCAGG |
| | | | GGTTTCTAATCGCTTCTCTGGCTCCAAGTCTGGCAACACGGCCT |
| | | | CCCTGACCATCTCTGGGCTCCAGGCTGAGGACGAGGCTGATTAT |
| | | | TACTGCAGCTCATATACAAACAACAGCACTATGGTATTCGGCGG |
| | | | AGGGACCAAGCTGACCGTCCTA |
| 641 | YANG-1117 | VL domain | QSALTQPASVSGSPGQSITISCTGTRSDVGRYNYVSWYQQHPGK |
| | | amino | APKLMIYEVTNRPSGVSNRFSGSKSGNTASLTISGLQAEDEADY |
| | | acid | YCSSYTNNSTMVFGGGTKLTVL |
| | | sequence | |
| 642 | YANG-1117 | LCDR1 | RSDVGRYNY |
| 643 | YANG-1117 | LCDR2 | EVT |
| 644 | YANG-1117 | LCDR3 | SSYTNNSTMV |
| 645 | YANG-1118 | VH domain | GAGGTACAGCTGGTGGAGTCTGGGGGAGGCCTGGTCAAGCCTGG |
| | | nucleic | GGGGTCCCTGAGACTCTCCTGTGCAGCCTCTGGATTCACCTTCA |
| | | acid | GTAGCTATGCCCTGAACTGGGTCCGCCAGGCTCCAGGGAAGGGG |
| | | sequence | CTGGAGTGGGTCTCATCCATTAGTACTGGTAGTAGTTACATATT |
| | | | CTACGCAGACTCAGTGAAGGGCCGATTCACCATCTCCAGAGACA |
| | | | ACGCCAAGCACTCACTGTCTCTGCAAATGAACAGCCTGAGAGCC |
| | | | GAGGACACAGCTGTGTATTACTGTGCGAAAACTGGGGATCTTCC |
| | | | TTTCTTTGACTACTGGGGCCAGGGAACCCTGGTCACCGTCTCCT |
| | | | CA |
| 646 | YANG-1118 | VH domain | EVQLVESGGGLVKPGGSLRLSCAASGFTFSSYALNWVRQAPGKG |
| | | amino | LEWVSSISTGSSYIFYADSVKGRFTISRDNAKHSLSLQMNSLRA |
| | | acid | EDTAVYYCAKTGDLPFFDYWGQGTLVTVSS |
| | | sequence | |
| 647 | YANG-1118 | HCDR1 | GFTFSSYA |
| 648 | YANG-1118 | HCDR2 | ISTGSSYI |
| 649 | YANG-1118 | HCDR3 | AKTGDLPFFDY |
| 650 | YANG-1118 | VL domain | CAGTCTGCCCTGACTCAGCCTGCCTCCGTGTCTGGGTCTCCTGG |
| | | nucleic | ACAGTCGATCACCATCTCCTGCACTGGAACCAGCAGTGACGTTG |
| | | acid | GTCGTTATAACTATGTCTCCTGGTACCAACAGCACCCAGGCAAA |
| | | sequence | GCCCCCAAACTCATGATTTATGAGGTCAGTAATCGGCCCTCAGG |
| | | | GGTTTCTAATCGCTTCTCTGGCTCCAAGTCTGGCAACACGGCCT |
| | | | CCCTGACCATCTCTGGGCTCCAGGCTGAGGACGAGGCTGATTAT |
| | | | TACTGCATCTCATATACAAGCAGCAGCACTATGGTGTTCGGCGG |
| | | | AGGGACCAAGTTGACCGTCCTA |
| 651 | YANG-1118 | VL domain | QSALTQPASVSGSPGQSITISCTGTSSDVGRYNYVSWYQQHPGK |
| | | amino | APKLMIYEVSNRPSGVSNRFSGSKSGNTASLTISGLQAEDEADY |
| | | acid | YCISYTSSSTMVFGGGTKLTVL |
| | | sequence | |
| 652 | YANG-1118 | LCDR1 | SSDVGRYNY |
| 615 | YANG-1118 | LCDR2 | EVS |
| 653 | YANG-1118 | LCDR3 | ISYTSSSTMV |
| 654 | YANG-1119 | VH domain | GAGGTGCAGCTGGTGGAGTCTGGGGGAGGCCTGGTCAAGCCTGG |
| | | nucleic | GGGGTCCCTGAGACTCTCCTGTGCAGCCTCTGGATTCACCTTCA |
| | | acid | GTAGCTATAGCATGAACTGGGTCCGCCAGGCTCCAGGGAAGGGG |
| | | sequence | CTGGAGTGGGTCTCATCCATTAGTACTGGTAGTAGTTACATATT |
| | | | CTACGCAGACTCAGTGAAGGGCCGATTCACCATCTCCAGAGACA |
| | | | ACGCCAAGAACTCACTGTATCTGCAAATGAACAGCCTGAGAGCC |
| | | | GAGGACACAGCTGTGTATTACTGTGCGAAAACTGGGGATCTTCC |
| | | | TTTCTTTGACTACTGGGGCCAGGGAACCCTGGTCACCGTCTCCT |
| | | | CA |
| 655 | YANG-1119 | VH domain | EVQLVESGGGLVKPGGSLRLSCAASGFTFSSYSMNWVRQAPGKG |
| | | amino | LEWVSSISTGSSYIFYADSVKGRFTISRDNAKNSLYLQMNSLRA |
| | | acid | EDTAVYYCAKTGDLPFFDYWGQGTLVTVSS |
| | | sequence | |
| 656 | YANG-1119 | HCDR1 | GFTFSSYS |
| 657 | YANG-1119 | HCDR2 | ISTGSSYI |
| 658 | YANG-1119 | HCDR3 | AKTGDLPFFDY |
| 659 | YANG-1119 | VL domain | CAGTCTGCCCTGACTCAGCCTGCCTCCGTGTCTGGGTCTCCTGG |
| | | nucleic | ACAGTCGATCACCATCTCCTGCACTGGAACCAGCAGTGACGTTG |
| | | acid | GTCGTTATAACTATGTCTCCTGGTACCAACAGCACCCAGGCAAA |
| | | sequence | GCCCCCAAACTCATGATTTATGAGGTCAGTAATCGGCCCTCAGG |
| | | | GGTTTCTAATCGCTTCTCTGGCTCCAAGTCTGGCAACACGGCCT |
| | | | CCCTGACCATCTCTGGGCTCCAGGCTGAGGACGAGGCTGATTAT |
| | | | TACTGCAGCTCATATACAAGCAGTAGCACGATGGTATTCGGCGG |
| | | | AGGGACCAAGCTGACCGTCCTA |
| 660 | YANG-1119 | VL domain | QSALTQPASVSGSPGQSITISCTGTSSDVGRYNYVSWYQQHPGK |
| | | amino | APKLMIYEVSNRPSGVSNRFSGSKSGNTASLTISGLQAEDEADY |
| | | acid | YCSSYTSSSTMVFGGGTKLTVL |
| | | sequence | |
| 661 | YANG-1119 | LCDR1 | SSDVGRYNY |
| 615 | YANG-1119 | LCDR2 | EVS |
| 662 | YANG-1119 | LCDR3 | SSYTSSSTMV |
| 663 | YANG-1201 | VH domain | CAGGTGCAGCTGCAGGAGTCGGGCCCAGGACTGGTGAAGCCTTC |
| | | nucleic | GGGGACCCTGTCCCTCACCTGCGCTGTCTCTGGTGACTCCATCA |
| | | acid | GTAATAGTAAATGGTGGAGTTGGGTCCGCCAGCCCCCAGGGAAG |
| | | sequence | GGGCTGGAGTGGATTGGGGAAATCTTTCATAGTGGGAGCACCAA |
| | | | CTACAACCCGTCCCTCAAGAGTCGAGTCACCATTTCAGTAGACA |
| | | | AGTCCCAGAACCAGTTCTCCCTGAAGCTGAACTCTGTGACCGCC |
| | | | GCGGACACGGCCGTGTATTACTGTGCGAGATCAGCATCTCTTTA |
| | | | TTACTACTACGGTGTGGACGTCTGGGGCCAAGGGACCACGGTCA |
| | | | CCGTCTCCTCA |
| 664 | YANG-1201 | VH domain | QVQLQESGPGLVKPSGTLSLTCAVSGDSISNSKWWSWVRQPPGK |
| | | amino | GLEWIGEIFHSGSTNYNPSLKSRVTISVDKSQNQFSLKLNSVTA |
| | | acid | ADTAVYYCARSASLYYYYGVDVWGQGTTVTVSS |
| | | sequence | |
| 665 | YANG-1201 | HCDR1 | GDSISNSKW |
| 666 | YANG-1201 | HCDR2 | IFHSGST |
| 667 | YANG-1201 | HCDR3 | ARSASLYYYYGVDV |
| 668 | YANG-1201 | VL domain | GAAATTGTCTTGACGCAGTCTCCAGGCACCCTGTCTTTGTCTCC |
| | | nucleic | AGGGGAGAGAGCCACCCTCTCCTGCAGGGCCAGTCAGAGTGTTA |
| | | acid | GCAACAACTACTTAGCTTGGTACCAGCAGAAACCTGGCCAGGCT |
| | | sequence | CCCAGGCTCCTCATCTATGGTACATCCAGGAGGGACACTGGCAT |
| | | | CCCAGACAGGTTCAGTGGCAGTGGGTCTGGGACAGACTTCACTC |
| | | | TCACCATCAGCAGACTGGAGCCTGAGGATTTTGCAGTGTATTAC |
| | | | TGTGAGCAGTATGGTAGTTTGCCTCGGACGTTCGGCCAAGGGAC |
| | | | CAAGGTGGAAATCAAA |
| 669 | YANG-1201 | VL domain | EIVLTQSPGTLSLSPGERATLSCRASQSVSNNYLAWYQQKPGQA |
| | | amino | PRLLIYGTSRRDTGIPDRESGSGSGTDFTLTISRLEPEDFAVYY |
| | | acid | CEQYGSLPRTFGQGTKVEIK |
| | | sequence | |
| 670 | YANG-1201 | LCDR1 | QSVSNNY |
| 671 | YANG-1201 | LCDR2 | GTS |
| 672 | YANG-1201 | LCDR3 | EQYGSLPRT |
| 673 | YANG-1202 | VH domain | GAGATGCAGCTGGTGGAGTCTGGGGGAGGCTTGGTCCAGCCTGG |
| | | nucleic | GGGGTCCCTGAGACTCTCCTGTGCAGCCTCTGGATTCACCTTTA |
| | | acid | GTAGTTTTTGGATGCGCTGGGTCCGTCAGGCTCCAGGGAAGGGG |
| | | sequence | CTGGAGTGGGTGGCCAATATAAAGCAAGATGGAACTGAGAAATA |
| | | | CTATGTGGACTCTGTGAAGGGCCGATTCACCATCTCCAGAGACA |
| | | | ACGCCAAGAACTCACTGTATCTGCAAATGAACAGTCTGAGAGCC |
| | | | GAGGACACGGCTGTATATTACTGTGTGAGAGATCGGGTCGGGGG |
| | | | GGACTATTACTACTACGATATGGACGTCTGGGGCCAAGGGACCA |
| | | | CGGTCACCGTCTCCTCA |
| 674 | YANG-1202 | VH domain | EMQLVESGGGLVQPGGSLRLSCAASGFTFSSFWMRWVRQAPGKG |
| | | amino | LEWVANIKQDGTEKYYVDSVKGRFTISRDNAKNSLYLQMNSLRA |
| | | acid | EDTAVYYCVRDRVGGDYYYYDMDVWGQGTTVTVSS |
| | | sequence | |
| 675 | YANG-1202 | HCDR1 | GFTFSSFW |
| 676 | YANG-1202 | HCDR2 | IKQDGTEK |
| 677 | YANG-1202 | HCDR3 | VRDRVGGDYYYYDMDV |
| 678 | YANG-1202 | VL domain | GACATCCAGATGACCCAGTCTCCATCCTCACTGTCTGCATCTGT |
| | | nucleic | AGGAGACAGAGTCACCATCACTTGTCGGGCGAGTCAGGACATTA |
| | | acid | GCAATTATTTAGCCTGGTTTCAGCAGAAACCAGGGAAAGCCCCT |
| | | sequence | AAGTCCCTGATCTATGCTGCATCCAGTTTGCAAAGCGGGGTCCC |
| | | | ATCAAAGTTCAGCGGCAGTGGATCTGGGACAGATTTCACTCTCA |
| | | | CCATCAGCGGCCTGCAGCCTGAAGATTCTGCAACTTATTACTGT |
| | | | CAACAGTATAATAGTTACCCTCGGACGTTCGGCCAAGGGACCAA |
| | | | GGTGGAAATCAAA |
| 679 | YANG-1202 | VL domain | DIQMTQSPSSLSASVGDRVTITCRASQDISNYLAWFQQKPGKAP |
| | | amino | KSLIYAASSLQSGVPSKFSGSGSGTDFTLTISGLQPEDSATYYC |
| | | acid | QQYNSYPRTFGQGTKVEIK |
| | | sequence | |
| 680 | YANG-1202 | LCDR1 | QDISNY |
| 18 | YANG-1202 | LCDR2 | AAS |
| 681 | YANG-1202 | LCDR3 | QQYNSYPRT |
| 682 | YANG-1203 | VH domain | GAAGTGCGGCTGGTGGAGTCTGGGGGAGCCTTGGTACAGCCTGG |
| | | nucleic | CAGGTCCCTGAGACTCTCCTGTGCAGCCTCTGGATTCATCTTTG |
| | | acid | ATGGTTATGCCATGCACTGGGTCCGGCAAGTTCCAGGGAAGGGC |
| | | sequence | CTGGAGTGGGTCTCAGGTATTAGTTGGAATAGTGGTAACATAGG |
| | | | CTATGCGGACTCTGTGAAGGGCCGATTCACCATCTCCAGAGACA |
| | | | ACGCCAAGAACTCCCTGTATCTGCAAATGAACAGTCTGAGAGCT |
| | | | GAGGACACGGCCTTGTATTACTGTGCAAAAGATATAAGGCCTTC |
| | | | GGGAAAGTACTATTACGGTATGGACGTCTGGGGCCAAGGGACCA |
| | | | CGGTCACCGTCTCCTCA |
| 683 | YANG-1203 | VH domain | EVRLVESGGALVQPGRSLRLSCAASGFIFDGYAMHWVRQVPGKG |
| | | amino | LEWVSGISWNSGNIGYADSVKGRFTISRDNAKNSLYLQMNSLRA |
| | | acid | EDTALYYCAKDIRPSGKYYYGMDVWGQGTTVTVSS |
| | | sequence | |
| 684 | YANG-1203 | HCDR1 | GFIFDGYA |
| 685 | YANG-1203 | HCDR2 | ISWNSGNI |
| 686 | YANG-1203 | HCDR3 | AKDIRPSGKYYYGMDV |
| 687 | YANG-1203 | VL domain | GACATCCAGATGACCCAGTCTCCATCCTCCCTGTCTGCATCTGT |
| | | nucleic | AGGAGACAGAGTCACCATCACTTGCCAGGCAAGTCAGGACATTA |
| | | acid | GAAACTATTTAAATTGGTATCAGCAGAAACCAGGGAAAGCCCCT |
| | | sequence | AAGCTCCTGATCTACGATGCATCCAATTTGGAAACAGGGGTCCC |
| | | | ATCGAGGTTCAGTGGAAGTGGATCTGGGACAGATTTTACTTTCA |
| | | | CCATCAGCAGCCTGCAGCCTGAAGATATTGCAACATATTACTGT |
| | | | CAACAGTATGATAAGCTCCTTTTCATTTTCGGCCCTGGGACCAA |
| | | | AGTGGATATCAAA |
| 688 | YANG-1203 | VL domain | DIQMTQSPSSLSASVGDRVTITCQASQDIRNYLNWYQQKPGKAP |
| | | amino | KLLIYDASNLETGVPSRFSGSGSGTDFTFTISSLQPEDIATYYC |
| | | acid | QQYDKLLFIFGPGTKVDIK |
| | | sequence | |
| 689 | YANG-1203 | LCDR1 | QDIRNY |
| 28 | YANG-1203 | LCDR2 | DAS |
| 690 | YANG-1203 | LCDR3 | QQYDKLLFI |
| 691 | YANG-1204 | VH domain | CAGGTGCAGCTGGTGGAGTCTGGGGGAGGCGTGGTCCAGCCTGG |
| | | nucleic | GAGGTCCCTGAGACTCTCCTGTGCAGTCTCTGGATTCACCTTCA |
| | | acid | GTAACTATGGCATACACTGGGTCCGCCAGGCTCCAGGCAAGGGG |
| | | sequence | CTGGTGTGGGTGGCAGTTATATCATATGAAGGAAGTATTAAATA |
| | | | TTATGGAGACTCCGTGAAGGGCCGATTCACCATCTCCAGAGACA |
| | | | ATTCCAAGAACACGCTGTATCTGCAAATGAACAGCCTGAGAGCC |
| | | | GAGGACACGGCTGTGTATTACTGTGCGAGAGGGGCAGTGGCTGG |
| | | | CAATGATGCTTTTGATATCTGGGGCCAAGGTACAATGGTCACCG |
| | | | TCTCTTCA |
| 692 | YANG-1204 | VH domain | QVQLVESGGGVVQPGRSLRLSCAVSGFTFSNYGIHWVRQAPGKG |
| | | amino | LVWVAVISYEGSIKYYGDSVKGRFTISRDNSKNTLYLQMNSLRA |
| | | acid | EDTAVYYCARGAVAGNDAFDIWGQGTMVTVSS |
| | | sequence | |
| 693 | YANG-1204 | HCDR1 | GFTFSNYG |
| 694 | YANG-1204 | HCDR2 | ISYEGSIK |
| 695 | YANG-1204 | HCDR3 | ARGAVAGNDAFDI |
| 696 | YANG-1204 | VL domain | GATGTTGTGATGACTCAGTCTCCACTCTCCCTGCCCGTCACCCT |
| | | nucleic | TGGACAGCCGGCCTCCATCTCCTGCAGGTCTAGTCAAAGCCTCG |
| | | acid | TATACAGTGATGGAAACACCTACTTGATTTGGTTTCAGCAGAGG |
| | | sequence | CCAGGCCAATCTCCAAGGCGCCTAATTTATAAGGTTTCTAATCG |
| | | | GGACTCTGGGGTCCCAGACAGATTCAGCGGCGGTGGGTCAGGCA |
| | | | CTGATTTCACACTGAAAATCAGCAGGGTGGAGGCTGAGGATGTT |
| | | | GGGGTTTATTACTGCATGCAAGGTACACACTGGCCTCTCACTTT |
| | | | CGGCGGAGGGACCAAGGTGGAGATCAAA |
| 697 | YANG-1204 | VL domain | DVVMTQSPLSLPVTLGQPASISCRSSQSLVYSDGNTYLIWFQQR |
| | | amino | PGQSPRRLIYKVSNRDSGVPDRFSGGGSGTDFTLKISRVEAEDV |
| | | acid | GVYYCMQGTHWPLTFGGGTKVEIK |
| | | sequence | |
| 698 | YANG-1204 | LCDR1 | QSLVYSDGNTY |
| 85 | YANG-1204 | LCDR2 | KVS |
| 699 | YANG-1204 | LCDR3 | MQGTHWPLT |
| 700 | YANG-1205 | VH domain | CAGGTGCAGCTGGTGCAGTCTGGGGCTGAGGTGAAGAAGCCTGG |
| | | nucleic | GGCCTCAGTGAAGGTTTCCTGCAAGGCATCTGGATACACCTTCA |
| | | acid | CCAGCTACTGTATACACTGGGTGCGACAGGCCCCTGGACAAGGA |
| | | sequence | CTTGAGTGGATGGGAATAATCAACCCTAGTGGTGGTGGCACAAT |
| | | | CTTCGCACAGAAGTTCCAGGGCAGAGTCACCATGACCAGGGACA |
| | | | CGTCCACGACCACAGTCTACATGGAGTTGGGCAGCCTGAGATCT |
| | | | GACGACACGGCCCTGTATTACTGTGCGCGAGGGTGGTCTTACGA |
| | | | TTTTTGGAGTGGCCCTGACTACTGGGGCCAGGGAACCCTGGTCT |
| | | | CCGTCTCCTCT |
| 701 | YANG-1205 | VH domain | QVQLVQSGAEVKKPGASVKVSCKASGYTFTSYCIHWVRQAPGQG |
| | | amino | LEWMGIINPSGGGTIFAQKFQGRVTMTRDTSTTTVYMELGSLRS |
| | | acid | DDTALYYCARGWSYDFWSGPDYWGQGTLVSVSS |
| | | sequence | |
| 702 | YANG-1205 | HCDR1 | GYTFTSYC |
| 703 | YANG-1205 | HCDR2 | INPSGGGT |
| 704 | YANG-1205 | HCDR3 | ARGWSYDFWSGPDY |
| 705 | YANG-1205 | VL domain | GATATTGTGATGACCCAGACTCCACTCTCTCTGTCCGTCACCCC |
| | | nucleic | TGGACAGCCGGCCTCCATCTCCTGCAAGTCTAGTCAGAGCCTCC |
| | | acid | TGCATAGTGATGGAAAGACCTATTTGTATTGGTACCTGCAGAAG |
| | | sequence | CCAGGCCAGCCTCCACAGCTCCTGATCTATGAAGTTTCCAACCG |
| | | | GTTCTCTGGAGTGCCAGATAGGTTCAGTGGCAGCGGGTCAGGGA |
| | | | CAGATTTCACACTGAAAATCAGCCGGGTGGGGGCTGAGGATGTT |
| | | | GGGATTTATTATTGCATGCACAGTATAAAGCTTCCTCCGACGTT |
| | | | CGGCCAAGGGACCAAGGTGGAAATCAAA |
| 706 | YANG-1205 | VL domain | DIVMTQTPLSLSVTPGQPASISCKSSQSLLHSDGKTYLYWYLQK |
| | | amino | PGQPPQLLIYEVSNRFSGVPDRFSGSGSGTDFTLKISRVGAEDV |
| | | acid | GIYYCMHSIKLPPTFGQGTKVEIK |
| | | sequence | |
| 707 | YANG-1205 | LCDR1 | QSLLHSDGKTY |
| 615 | YANG-1205 | LCDR2 | EVS |
| 708 | YANG-1205 | LCDR3 | MHSIKLPPT |
| 709 | YANG-1206 | VH domain | CAGGTGCACCTGGTGGAGTCTGGGGGAGGCATGGTCCAGCCTGG |
| | | nucleic | GAGGTCCCTGAGACTCTCCTGTGCAGCCTCTGGATTCACCTTCA |
| | | acid | GTATCTATGCCATGCACTGGGTCCGCCAGGCTCCAGGCAAGGGG |
| | | sequence | CTGGAGTGGGTGGCAGTTATATCATATGATGGAAGTAATAAATA |
| | | | TTATGCAGACTCCGTGAAGGGCCGATTCACCATCTCCAGAGACA |
| | | | ATTCCAAGAACACGCTGTATCTGCAAATGAACAGCCTGAGAGCT |
| | | | GAGGACACGGCTGTGTATTACTGTGCGAAAGTCTATGGTGGGAG |
| | | | CTACTGGGGGGGCTTTGACTACTGGGGCCAGGGAACCCTGGTCA |
| | | | CCGTCTCCTCA |
| 710 | YANG-1206 | VH domain | QVHLVESGGGMVQPGRSLRLSCAASGFTFSIYAMHWVRQAPGKG |
| | | amino | LEWVAVISYDGSNKYYADSVKGRFTISRDNSKNTLYLQMNSLRA |
| | | acid | EDTAVYYCAKVYGGSYWGGFDYWGQGTLVTVSS |
| | | sequence | |
| 711 | YANG-1206 | HCDR1 | GFTFSIYA |
| 712 | YANG-1206 | HCDR2 | ISYDGSNK |
| 713 | YANG-1206 | HCDR3 | AKVYGGSYWGGFDY |
| 714 | YANG-1206 | VL domain | CAGTCTGTGCTGACGCAGCCGCCCTCAGTGTCTGGGGCCCCAGG |
| | | nucleic | GCAGAGGGTCACCATCTCCTGCACTGGGACCAGCTCCAACATCG |
| | | acid | GGTCAATTTATGATGTACACTGGTACCAGCAGCTTCCAGGAACA |
| | | sequence | GCCCCCAAACTCCTCATCTATGGTAACAGCAATCGGCCCTCAGG |
| | | | GGTCCCTGACCGATTCTCTGGCTCCAAGTCTGGCACCTCGGCCT |
| | | | CCCTGGCCATCACTGGGCTCCAGGCTGAGGATGAGGCTGATTAT |
| | | | TACTGCCAGTCCTATGACACCAGCCTGAGTGGTTCTTGGGTGTT |
| | | | CGGCGGAGGGACCAAGCTGAACGTCCTA |
| 715 | YANG-1206 | VL domain | QSVLTQPPSVSGAPGQRVTISCTGTSSNIGSIYDVHWYQQLPGT |
| | | amino | APKLLIYGNSNRPSGVPDRFSGSKSGTSASLAITGLQAEDEADY |
| | | acid | YCQSYDTSLSGSWVFGGGTKLNVL |
| | | sequence | |
| 716 | YANG-1206 | LCDR1 | SSNIGSIYD |
| 717 | YANG-1206 | LCDR2 | GNS |
| 718 | YANG-1206 | LCDR3 | QSYDTSLSGSWV |
| 719 | YANG-1207 | VH domain | CAGGTGCAGCTGGTGGAGTCTGGGGGAGGCGTGGTCCAGCCTGG |
| | | nucleic | GAGGTCCCTGAGACTCTCCTGTGCAGCGTCTGGATTCACCTTCA |
| | | acid | GTAGTTATGGCATGCACTGGGTCCGCCAGGCTCCAGGCAAGGGG |
| | | sequence | CTGGAGTGGGTGTCAGTTATATGGTATGATGGAACTAATAAATA |
| | | | CTATGCAGACTCCGTGAAGGGCCGATTCACCATCTCCAGAGACA |
| | | | ATTCCAAGAACACGCTGTATCTGCAAATGAACAGCCTGAGAGCC |
| | | | GAGGACACGGCTGTGTATTACTGTGCGAGAGAGGGAGTGGAATT |
| | | | CACTGGGTACTTTGACTACTGGGGCCAGGGAACCCTGGTCACCG |
| | | | TCTCCTCA |
| 720 | YANG-1207 | VH domain | QVQLVESGGGVVQPGRSLRLSCAASGFTFSSYGMHWVRQAPGKG |
| | | amino | LEWVSVIWYDGINKYYADSVKGRFTISRDNSKNTLYLQMNSLRA |
| | | acid | EDTAVYYCAREGVEFTGYFDYWGQGTLVTVSS |
| | | sequence | |
| 721 | YANG-1207 | HCDR1 | GFTFSSYG |
| 722 | YANG-1207 | HCDR2 | IWYDGTNK |
| 723 | YANG-1207 | HCDR3 | AREGVEFTGYFDY |
| 724 | YANG-1207 | VL domain | TCCTATGAGCTGACTCAGCCACCCTCAGTGTCCGTGTCCCCAGG |
| | | nucleic | ACAGACAGCCAGCATCACCTGCTCTGGAGATAAATTGGGGGATA |
| | | acid | AATATGCTTGCTGGTATCAGCAGAAGCCAGGCCAGTCCCCTGTG |
| | | sequence | CTGGTCATCTATCAAGATAGCAAGCGGCCCTCAGGGATCCCTGA |
| | | | GCGATTCTCTGGCTCCAACTCTGGGAACACAGCCACTCTGACCA |
| | | | TCAGCGGGACCCAGGCTATGGATGAGGCTGACTATTACTGTCAG |
| | | | GCGTGGACCAGCAACACTGCAGTGGTATTCGGCGGAGGGACCAA |
| | | | GCTGACCGTCCTA |
| 725 | YANG-1207 | VL domain | SYELTQPPSVSVSPGQTASITCSGDKLGDKYACWYQQKPGQSPV |
| | | amino | LVIYQDSKRPSGIPERFSGSNSGNTATLTISGTQAMDEADYYCQ |
| | | acid | AWTSNTAVVFGGGTKLTVL |
| | | sequence | |
| 726 | YANG-1207 | LCDR1 | KLGDKY |
| 727 | YANG-1207 | LCDR2 | QDS |
| 728 | YANG-1207 | LCDR3 | QAWTSNTAVV |
| 729 | YANG-1301 | VH domain | CAGGTGCAGCTCGTGGAGTCTGGGGGAGGCGTGGTCCAGCCTGG |
| | | nucleic | GAGGTCCCTGAGACTCTCCTGTGCAGCGTCTGGATTCACCTTCA |
| | | acid | GTAGTTATGGCATGCACTGGGTCCGCCAGGCTCCAGGCAAGGGG |
| | | sequence | CTGGAGTGGGTGGCAGTTATCTGGTATGATGGAAGTAATAAATT |
| | | | CTATGCAGACTCCGTGAAGGGCCGATTCACCATCTCCAGAGACA |
| | | | ATTCCAAGAACACACTGTATCTGCAAATGAACAGCCTAAAAGCC |
| | | | GAAGACACGGCTGTGTATTACTGTGCGAGAGATACCTGGATCGG |
| | | | GGAGTCCGATACTAGCTGGCTCGACCCCTGGGGCCAGGGAACCC |
| | | | TGGTCACCGTCTCCTCA |
| 730 | YANG-1301 | VH domain | QVQLVESGGGVVQPGRSLRLSCAASGFTFSSYGMHWVRQAPGKG |
| | | amino | LEWVAVIWYDGSNKFYADSVKGRFTISRDNSKNTLYLQMNSLKA |
| | | acid | EDTAVYYCARDTWIGESDTSWLDPWGQGTLVTVSS |
| | | sequence | |
| 731 | YANG-1301 | HCDR1 | GFTFSSYG |
| 732 | YANG-1301 | HCDR2 | IWYDGSNK |
| 733 | YANG-1301 | HCDR3 | ARDTWIGESDTSWLDP |
| 734 | YANG-1301 | VL domain | TCCTATGAGCTGACTCAGCCACCCTCAGTGTCCGTGTCCCCGGG |
| | | nucleic | ACAGACAGCCAGCATCACCTGCTCTGGAGATAAATTGGGGGATA |
| | | acid | AATATGCTTGCTGGTATCAACAGAAGCCAGGCCAGTCCCCTGTA |
| | | sequence | TTAATCGTCTATCAAGATAGCAAGCGGCCCTCAGGGATCCCTGA |
| | | | GCGATTCTCTGGCTCCAACTCTGGGAACACAGCCACTCTGACCA |
| | | | TCAGCGGGACCCAGGCTATGGATGAGGCTGATTATTACTGTCAG |
| | | | GCGTGGGACAGCTTCACTGCCGTGGTATTCGGCGGAGGGACCAA |
| | | | GCTGACCGTCCTA |
| 735 | YANG-1301 | VL domain | SYELTQPPSVSVSPGQTASITCSGDKLGDKYACWYQQKPGQSPV |
| | | amino | LIVYQDSKRPSGIPERFSGSNSGNTATLTISGTQAMDEADYYCQ |
| | | acid | AWDSFTAVVFGGGTKLTVL |
| | | sequence | |
| 736 | YANG-1301 | LCDR1 | KLGDKY |
| 727 | YANG-1301 | LCDR2 | QDS |
| 737 | YANG-1301 | LCDR3 | QAWDSFTAVV |
| 738 | YANG-1302 | VH domain | CAGGTGCAGCTGGTGGAGTCTGGGGGAGGCGCGGTCCAGCCTGG |
| | | nucleic | GAGGTCCCTGAGACTCTCCTGTAGAGCGTCTGGATTCACCTTCA |
| | | acid | GTAGTTTTGGCATGAATTGGGTCCGCCAGGTTCCAGGCAAGGGG |
| | | sequence | CTGGTATGGGTGGCAGGTATATGGTATGATGGAAGGAATAAGTA |
| | | | CTATGCAGACTCCGTGAAGGGCCGATTCACCATCTCCAGAGAGA |
| | | | ATTCCAAGAATATGCTGTATCTGCAAATGAACAGTCTGAGAGCC |
| | | | GAGGACACGGCTGTGTATTACTGTGCGAGAGATCAAGATAGTGG |
| | | | TTTCGATGGCAACTGGTTCGGCCCCTGGGGCCAGGGAACCATGG |
| | | | TCACCGTCTCCTCA |
| 739 | YANG-1302 | VH domain | QVQLVESGGGAVQPGRSLRLSCRASGFTFSSFGMNWVRQVPGKG |
| | | amino | LVWVAGIWYDGRNKYYADSVKGRFTISRENSKNMLYLQMNSLRA |
| | | acid | EDTAVYYCARDQDSGFDGNWFGPWGQGTMVTVSS |
| | | sequence | |
| 740 | YANG-1302 | HCDR1 | GFTFSSFG |
| 741 | YANG-1302 | HCDR2 | IWYDGRNK |
| 742 | YANG-1302 | HCDR3 | ARDQDSGFDGNWFGP |
| 743 | YANG-1302 | VL domain | TCCTATGAACTGACTCAGCCACCCTCAATGTCCGTGTCCCCAGG |
| | | nucleic | ACAGACAGCCAGCATCACCTGCTCTGGAGATAACTTGGGGGATA |
| | | acid | AATATGTTTGCTGGTATCAACAGAGGCCAGGCCAGTCCCCTGTG |
| | | sequence | ATGGTCATCTTTCAAGATAGCACGCGGCCCTCAGGGATCCCTGA |
| | | | GCGATTCTCTGGCTCCAACTCTGGAAACACAGCCACTCTGACCA |
| | | | TCAGCGGGACCCAGGCTATGGATGAGGCTGACTATTACTGTCAG |
| | | | GCGTGGGACAGCAACACTGCGGTATTCGGCGGAGGGACCAAGCT |
| | | | GACCGTCCTA |
| 744 | YANG-1302 | VL domain | SYELTQPPSMSVSPGQTASITCSGDNLGDKYVCWYQQRPGQSPV |
| | | amino | MVIFQDSTRPSGIPERFSGSNSGNTATLTISGTQAMDEADYYCQ |
| | | acid | AWDSNTAVFGGGTKLTVL |
| | | sequence | |
| 745 | YANG-1302 | LCDR1 | NLGDKY |
| 727 | YANG-1302 | LCDR2 | QDS |
| 746 | YANG-1302 | LCDR3 | QAWDSNTAV |
| 747 | YANG-1303 | VH domain | CAGGTTCAGCTGGTGCAGTCTGGAACTGAGATGAAGGAGCCTGG |
| | | nucleic | GGCCTCAGTGAAGGTCTCCTGCAAGGCTTCTGGTTACACCTTTA |
| | | acid | CCAACTATGGTATCACCTGGGTGCGACAGGCCCCTGGACAAGGG |
| | | sequence | CTTGAGTGGATGGGATGGCTCAACACTAACAATGGGGACACAAA |
| | | | CTATGCTCAGAAACTCCAGGGCAGAGTCACCATGACCACAGACA |
| | | | CATCCACGAGCACAGCCTACATGGAACTGAGGAGCCTGAGATCT |
| | | | GACGACACGGCCGTGTATTATTGTGCGCGAGACTCGGTGACTAC |
| | | | GTATGACTACTGGGGCCAGGGAACCCTGGTCACCGTCTCCTCA |
| 748 | YANG-1303 | VH domain | QVQLVQSGTEMKEPGASVKVSCKASGYTFTNYGITWVRQAPGQG |
| | | amino | LEWMGWLNTNNGDTNYAQKLQGRVTMTTDTSTSTAYMELRSLRS |
| | | acid | DDTAVYYCARDSVTTYDYWGQGTLVTVSS |
| | | sequence | |
| 749 | YANG-1303 | HCDR1 | GYTFTNYG |
| 750 | YANG-1303 | HCDR2 | LNTNNGDT |
| 751 | YANG-1303 | HCDR3 | ARDSVTTYDY |
| 752 | YANG-1303 | VL domain | TCCTATGAACTGACACAGCCACCCTCGGTGTCAGTGTCCCCAGG |
| | | nucleic | ACAAACGGCCAGGATCACCTGCTCTGGAGATGCATTGCCAAAAA |
| | | acid | AATATGCTTATTGGTTCCAGCAGAAGTCAGCCCAGGCCCCTGTG |
| | | sequence | CTGGTCATCTATGAGGACAGCAAACGACCCTCCGGGATCCCTGA |
| | | | GAGATTCTCTGGCTCCAGCTCAGGGACAATGGCCACCTTGACTA |
| | | | TCAATGGGGCCCAGGTGGAGGATGAAGCTGCCTACTACTGTTAT |
| | | | TCATTGGACAGCAGTGGTAATCATTGGGTGTTCGGCGGAGGGAC |
| | | | CAAGTTGACCGTCCTA |
| 753 | YANG-1303 | VL domain | SYELTQPPSVSVSPGQTARITCSGDALPKKYAYWFQQKSAQAPV |
| | | amino | LVIYEDSKRPSGIPERFSGSSSGTMATLTINGAQVEDEAAYYCY |
| | | acid | SLDSSGNHWVFGGGTKLTVL |
| | | sequence | |
| 754 | YANG-1303 | LCDR1 | ALPKKY |
| 755 | YANG-1303 | LCDR2 | EDS |
| 756 | YANG-1303 | LCDR3 | YSLDSSGNHWV |
| 757 | YANG-1304 | VH domain | CAGGTTCAACTACAGCAGTGGGGCGCAGGACTGGTGAAGACTTC |
| | | nucleic | GGAGACCCTGTCCCTCACCTGCGCTGTCTATGGTGGGTCTTTCA |
| | | acid | ATGATCACTATTGGAGCTGGATCCGACAGCCCCCAGGAAAGGGA |
| | | sequence | CTGGAGTGGATTGGGGAAATCAATCATAGTGGAAGCACCAACTA |
| | | | CAATCCGTCCCTCAAGAGTCGAGTCACCATGTCACTGGACACGT |
| | | | CCAAGAACCAGTTCTCCCTCAAGTTGAGGTCTTTGACCGCCGCG |
| | | | GACACGGCTATGTATTACTGTGCGATTGAGGGAATCTGGGGCCA |
| | | | GGGAGCCATGGTCACCGTCTCCTCA |
| 758 | YANG-1304 | VH domain | QVQLQQWGAGLVKTSETLSLTCAVYGGSENDHYWSWIRQPPGKG |
| | | amino | LEWIGEINHSGSTNYNPSLKSRVTMSLDTSKNQFSLKLRSLTAA |
| | | acid | DTAMYYCAIEGIWGQGAMVTVSS |
| | | sequence | |
| 759 | YANG-1304 | HCDR1 | GGSENDHY |
| 760 | YANG-1304 | HCDR2 | INHSGST |
| 761 | YANG-1304 | HCDR3 | AIEGI |
| 762 | YANG-1304 | VL domain | TCCTATGAGCTGACACAGCCACCCTCGGTGTCAGTGTCCCCAGG |
| | | nucleic | ACAAACGGCCAGGATCACCTGCTCTGGAGATGCATTGCCAATTA |
| | | acid | AATATGTTCATTGGTACCAGCAGAAGTCAGGCCAGGCCCCTGTG |
| | | sequence | CTGGTCATCTATGAGGACAGCAAACGACCCTCCGGGATCCCTGA |
| | | | GAGAATCTCTGGCTCCAGCTCAGGGACAATGGCCACCTTGACTA |
| | | | TGAGTGGGGCCCAGGTGGAGGATGAAGCTGACTACTACTGTTAC |
| | | | TCAACAGACAGCAGTGGTAATCATTGGGTGTTCGGCGGAGGGAC |
| | | | CAAGCTGACCGTCCTA |
| 763 | YANG-1304 | VL domain | SYELTQPPSVSVSPGQTARITCSGDALPIKYVHWYQQKSGQAPV |
| | | amino | LVIYEDSKRPSGIPERISGSSSGTMATLTMSGAQVEDEADYYCY |
| | | acid | STDSSGNHWVFGGGTKLTVL |
| | | sequence | |
| 764 | YANG-1304 | LCDR1 | ALPIKY |
| 755 | YANG-1304 | LCDR2 | EDS |
| 765 | YANG-1304 | LCDR3 | YSTDSSGNHWV |
| 766 | YANG-1305 | VH domain | CAGGTGCAGCTGGTGGAGTCTGGGGGAGGCGTGGTCCAGCCTGG |
| | | nucleic | GAAGTCCCTGAGACTCTCCTGTGCAGCCTCTGGATTCGCCTTCA |
| | | acid | GTAGCTTTGGCATGCACTGGGTCCGCCAGGCTCCAGGCACGGGG |
| | | sequence | CTGGAGTGGTTGGCAATTATATCATTTGAAGGAACTAAAAAATA |
| | | | CTATGCAGACTCCATGAAGGGCCGAATCACCATCTCCAGAGACA |
| | | | ATTCCAAGAACACGCTGTATCTGCAAATGAACAGTTTGAGAGCT |
| | | | GAGGACACGGCTGTGTATTACTGTGCGGCTGACTATGGTGACTA |
| | | | CGACGACTATTACTACGGTGTGCACGTCTGGGGCCAAGGGACCA |
| | | | CGGTCACCGTCTCCTCA |
| 767 | YANG-1305 | VH domain | QVQLVESGGGVVQPGKSLRLSCAASGFAFSSFGMHWVRQAPGTG |
| | | amino | LEWLAIISFEGTKKYYADSMKGRITISRDNSKNTLYLQMNSLRA |
| | | acid | EDTAVYYCAADYGDYDDYYYGVHVWGQGTTVTVSS |
| | | sequence | |
| 768 | YANG-1305 | HCDR1 | GFAFSSFG |
| 769 | YANG-1305 | HCDR2 | ISFEGTKK |
| 770 | YANG-1305 | HCDR3 | AADYGDYDDYYYGVHV |
| 771 | YANG-1305 | VL domain | GACATCCAAATGACCCAGTCTCCATCCTCCCTGTCTGCATCTGT |
| | | nucleic | AGGAGACAGAGTCACCATCACTTGCCGGGCGAGTCAGGGCATTG |
| | | acid | CCAATTATTTAGCCTGGTATCAGCAGAAACCGGGGAAAGTTCCT |
| | | sequence | AAGCTCCTGATCTATGCTACATCCACTTTGCAATCAGGGGTCCC |
| | | | ATCTCGGTTCAGTGGCAGTGGATCTGGGACAGATTTCACTCTCA |
| | | | CCATCAGCAGCCTGCAGCCTGAAGATGTTGCAATTTATTACTGT |
| | | | CAAAAGTATGACAGTGCCCCATTCACTTTCGGCCCTGGGACCAA |
| | | | AGTGGATTTCAAA |
| 772 | YANG-1305 | VL domain | DIQMTQSPSSLSASVGDRVTITCRASQGIANYLAWYQQKPGKVP |
| | | amino | KLLIYATSTLQSGVPSRFSGSGSGTDFTLTISSLQPEDVAIYYC |
| | | acid | QKYDSAPFTFGPGTKVDFK |
| | | sequence | |
| 773 | YANG-1305 | LCDR1 | QGIANY |
| 774 | YANG-1305 | LCDR2 | ATS |
| 775 | YANG-1305 | LCDR3 | QKYDSAPFT |
| 776 | YANG-1401 | VH domain | CAGGTGCACCTGCAGGAGTCGGGCCCAGGACTGGTGAAGCCTTC |
| | | nucleic | GGGGACCCTGTCCCTCACCTGCGCTGTCTCTGGTGGCTCCTTCA |
| | | acid | GCCAGATTAACTGGTGGAGTTGGGTCCGCCAGTCCCCAGGAAAG |
| | | sequence | GGGCTGGAGTGGATTGGGGAAATCTATCATAGTGGGAGTACCAA |
| | | | CTACAACCCGTCCCTCAAGAGTCGAGTCACCATGTCAGTAGACA |
| | | | AGTCCAAGAACCAGTTCTCCCTGGCGCTGAACTCTGTGACCGCC |
| | | | GCGGACACGGCCGTATATTACTGTGCGAGGGGGTATTATGGTGA |
| | | | CAACTGGTTCGACTCCTGGGGCCAGGGAACCCTGGTCACCGTCT |
| | | | CCTCA |
| 777 | YANG-1401 | VH domain | QVHLQESGPGLVKPSGTLSLTCAVSGGSFSQINWWSWVRQSPGK |
| | | amino | GLEWIGEIYHSGSTNYNPSLKSRVTMSVDKSKNQFSLALNSVTA |
| | | acid | ADTAVYYCARGYYGDNWFDSWGQGTLVTVSS |
| | | sequence | |
| 778 | YANG-1401 | HCDR1 | GGSFSQINW |
| 779 | YANG-1401 | HCDR2 | IYHSGST |
| 780 | YANG-1401 | HCDR3 | ARGYYGDNWEDS |
| 781 | YANG-1401 | VL domain | GACATCCAGATGACCCAGTCTCCATCCTCACTGTCTGCTTCTAT |
| | | nucleic | AGGCGACAGAGTCACCATCACTTGTCGGGCGAGTCAGGGTATTA |
| | | acid | GCAACTGGTTAGTCTGGTATCAGCAGAAACCAGAGAAAGCCCCT |
| | | sequence | AAGTCCCTGATCTATGCTGCATCCAGTTTGCAAAGTGGGGTCCC |
| | | | ATCAAGGTTCAGCGGCAGTGGATCTGGGACAGATTTCACTCTAA |
| | | | CCATCAGCAGCCTGCATCCTGAAGATTTTGCAACTTATTACTGC |
| | | | CAACAGTATAGTGATTACCCTCTCACTTTCGGCGGAGGGACCAA |
| | | | GGTGGAGATCAAA |
| 182 | YANG-1401 | VL domain | DIQMTQSPSSLSASIGDRVTITCRASQGISNWLVWYQQKPEKAP |
| | | amino | KSLIYAASSLQSGVPSRFSGSGSGTDFTLTISSLHPEDFATYYC |
| | | acid | QQYSDYPLTFGGGTKVEIK |
| | | sequence | |
| 783 | YANG-1401 | LCDR1 | QGISNW |
| 18 | YANG-1401 | LCDR2 | AAS |
| 784 | YANG-1401 | LCDR3 | QQYSDYPLT |
| 785 | YANG-1401a | VH domain | CAGGTGCACCTGCAGGAGTCGGGCCCAGGACTGGTGAAGCCTTC |
| | | nucleic | GGGGACCCTGTCCCTCACCTGCGCTGTCTCTGGTGGCTCCTTCA |
| | | acid | GCCAGATTAACTGGTGGAGTTGGGTCCGCCAGTCCCCAGGAAAG |
| | | sequence | GGGCTGGAGTGGATTGGGGAAATCTATCATAGTGGGAACACCAA |
| | | | CTACAACCCGTCCCTCAAGAGTCGAGTCACCATGTCAGTAGACA |
| | | | AGTCCAAGAACCAGTTCTCCCTGGCGCTGAACTCTGTGACCGCC |
| | | | GCGGACACGGCCGTGTATTATTGTGCGAGGGGGTATTATGGTGA |
| | | | CAACTGGTTCGACTCCTGGGGCCAGGGAACCCTGGTCACCGTCT |
| | | | CCTCA |
| 786 | YANG-1401a | VH domain | QVHLQESGPGLVKPSGTLSLTCAVSGGSFSQINWWSWVRQSPGK |
| | | amino | GLEWIGEIYHSGNTNYNPSLKSRVTMSVDKSKNQFSLALNSVTA |
| | | acid | ADTAVYYCARGYYGDNWFDSWGQGTLVTVSS |
| | | sequence | |
| 787 | YANG-1401a | HCDR1 | GGSFSQINW |
| 788 | YANG-1401a | HCDR2 | IYHSGNT |
| 789 | YANG-1401a | HCDR3 | ARGYYGDNWEDS |
| 790 | YANG-1401a | VL domain | GACATCCAGATGACCCAGTCTCCATCCTCACTGTCTGCTTCTAT |
| | | nucleic | AGGCGACAGAGTCACCATCACTTGTCGGGCGAGTCAGGGTATTA |
| | | acid | GCAGCTGGTTAGTCTGGTATCAGCAGAAACCAGAGAAAGCCCCT |
| | | sequence | AAGTCCCTGATCTATGCTGCATCCAGTTTGCAAAGTGGGGTCCC |
| | | | ATCAAGGTTCAGCGGCAGTGGATCTGGGACAGATTTCACTCTCA |
| | | | CCATCAGCAGCCTGCATCCTGAAGATTTTGCAACTTATTACTGC |
| | | | CAACAGTATAGTGATTACCCTCTCACTTTCGGCGGAGGGACCAA |
| | | | GGTGGAGATCAAA |
| 791 | YANG-1401a | VL domain | DIQMTQSPSSLSASIGDRVTITCRASQGISSWLVWYQQKPEKAP |
| | | amino | KSLIYAASSLQSGVPSRFSGSGSGTDFTLTISSLHPEDFATYYC |
| | | acid | QQYSDYPLTFGGGTKVEIK |
| | | sequence | |
| 792 | YANG-1401a | LCDR1 | QGISSW |
| 18 | YANG-1401a | LCDR2 | AAS |
| 793 | YANG-1401a | LCDR3 | QQYSDYPLT |
| 794 | YANG-1401b | VH domain | CAGGTGCAGCTGCAGGAGTCGGGCCCAGGACTGGTGAAGCCTTC |
| | | nucleic | GGGGACCCTGTCCCTCACCTGCGTTGTCTCTGGTGGCTCCTTCA |
| | | acid | GCAATACTAATTGGTGGAGTTGGGTCCGCCAGCCCCCAGAAAAG |
| | | sequence | GGGCTGGAGTGGATTGGGGAAGTCTATCATAGTGGGAGCACCAA |
| | | | CTACAACCCGTCCCTCATGAATCGAGTCACCATATCAGTAGACA |
| | | | AGTCCAGGAACCAGTTCTCCCTGAACCTGAGTTCTGTGACCGCC |
| | | | GCGGACACGGCCGTGTATTTCTGTGCGAGGGGGTATTATGGTGA |
| | | | CAATTGGTTCGACTCCTGGGGCCAGGGAACCCTGGTCACCGTCT |
| | | | CCTCA |
| 795 | YANG-1401b | VH domain | QVQLQESGPGLVKPSGTLSLTCVVSGGSFSNTNWWSWVRQPPEK |
| | | amino | GLEWIGEVYHSGSTNYNPSLMNRVTISVDKSRNQFSLNLSSVTA |
| | | acid | ADTAVYFCARGYYGDNWEDSWGQGTLVTVSS |
| | | sequence | |
| 796 | YANG-1401b | HCDR1 | GGSFSNTNW |
| 797 | YANG-1401b | HCDR2 | VYHSGST |
| 798 | YANG-1401b | HCDR3 | ARGYYGDNWFDS |
| 799 | YANG-1401b | VL domain | GACATCCAGATGACCCAGTCTCCATCCTCACTGTCTGCATCTGT |
| | | nucleic | AGGAGACAGAGTCATCATCACTTGTCGGGCGAGTCAGGGTATTA |
| | | acid | GCAGTTGGTTAGCCTGGTATCAGCAGAAACCAGAGAAAGCCCCT |
| | | sequence | AAGTCCCTGATCTATTCTGCATCCACTTTGCAAAGTGGAGTCCC |
| | | | ATCAAGGTTCAGCGGCAGTGGATCTGGGACAGATTTCACTCTCA |
| | | | CCATCAGCAGCCTGCAGCCTGAAGATTTTGCAACTTATTACTGC |
| | | | CAACAGTCTAATAGTTACCCTCTCACTTTCGGCGGAGGGACCAA |
| | | | GGTCGAGATCAAA |
| 800 | YANG-1401b | VL domain | DIQMTQSPSSLSASVGDRVIITCRASQGISSWLAWYQQKPEKAP |
| | | amino | KSLIYSASTLQSGVPSRFSGSGSGTDFTLTISSLQPEDFATYYC |
| | | acid | QQSNSYPLTFGGGTKVEIK |
| | | sequence | |
| 801 | YANG-1401b | LCDR1 | QGISSW |
| 517 | YANG-1401b | LCDR2 | SAS |
| 802 | YANG-1401b | LCDR3 | QQSNSYPLT |
| 803 | YANG-1401c | VH domain | CAGGTGCAGCTGCAGGAGTCGGGCCCAGGACTGGTGAAGCCTTC |
| | | nucleic | GGGGACCCTGTCCCTCACCTGCGTTGTCTCTGGTGGCTCCTTCA |
| | | acid | CCAATACTAATTGGTGGAGTTGGGTCCGCCAGCCCCCAGGGAAG |
| | | sequence | GGGCTGGAGTGGATTGGGGAAGTCTATCATAGTGGGAGCACCAA |
| | | | CTACAACCCGTCCCTCAAGAGTCGAGTCACCATATCAGTAGACA |
| | | | AGTCCAAGAACCAGTTCTCCCTGAACCTGACTTCTGTGACCGCC |
| | | | GCGGACACGGCCGTGTATTACTGTGCGAGGGGGTATTATGGTGA |
| | | | CAATTGGTTCGACTCCTGGGGCCAGGGAACCCTGGTCACCGTCT |
| | | | CCTCA |
| 804 | YANG-1401c | VH domain | QVQLQESGPGLVKPSGTLSLTCVVSGGSFTNTNWWSWVRQPPGK |
| | | amino | GLEWIGEVYHSGSTNYNPSLKSRVTISVDKSKNQFSLNLTSVTA |
| | | acid | ADTAVYYCARGYYGDNWFDSWGQGTLVTVSS |
| | | sequence | |
| 805 | YANG-1401c | HCDR1 | GGSFTNTNW |
| 806 | YANG-1401c | HCDR2 | VYHSGST |
| 807 | YANG-1401c | HCDR3 | ARGYYGDNWEDS |
| 808 | YANG-1401c | VL domain | GACATCCAGATGACCCAGTCTCCATCCTCACTGTCTGCATCTGT |
| | | nucleic | AGGAGACAGAGTCACCATCACTTGTCGGGCGAGTCAGGGTATTA |
| | | acid | GCAGCTGGTTAGCCTGGTATCAGCAGAAACCAGAGAAAGCCCCT |
| | | sequence | AAGTCCCTGATCTATTCTGCATCCACTTTGCAAAGTGGAGTCCC |
| | | | ATCAAGGTTCAGCGGCAGTGGATCTGGGACAGATTTCACTCTCA |
| | | | CCATCAGCAGCCTGCAGCCTGAAGATTTTGCAACTTATTACTGC |
| | | | CAACAGTCTAATAGTTACCCTCTCACTTTCGGCGGAGGGACCAA |
| | | | GGTCGAGATCAAA |
| 809 | YANG-1401c | VL domain | DIQMTQSPSSLSASVGDRVTITCRASQGISSWLAWYQQKPEKAP |
| | | amino | KSLIYSASTLQSGVPSRFSGSGSGTDFTLTISSLQPEDFATYYC |
| | | acid | QQSNSYPLTFGGGTKVEIK |
| | | sequence | |
| 810 | YANG-1401c | LCDR1 | QGISSW |
| 517 | YANG-1401c | LCDR2 | SAS |
| 811 | YANG-1401c | LCDR3 | QQSNSYPLT |
| 812 | YANG-1401d | VH domain | CAGGTGCAGCTGCAGGAGTCGGGCCCAGGACTGGTGAAGCCTTC |
| | | nucleic | GGGGACCCTGTCCCTCACCTGCGTTGTCTCTGGTGGCTCCTTCA |
| | | acid | GCAATACTAATTGGTGGAGTTGGGTCCGCCAGCCCCCAGGGAAG |
| | | sequence | GGGCTGGAGTGGATTGGGGAAGTCTTTCATAGTGGGAGCACCAA |
| | | | CTACAACCCGTCCCTCAAGAGTCGAGTCACCATATCAGTAGACA |
| | | | AGTCCAAGAACCAGTTCTCCCTGAACCTGAGTTCTGTGACCGCC |
| | | | GCGGACACGGCCGTGTATTACTGTGCGAGGGGGTATTATGGTGA |
| | | | CAATTGGTTCGACTCCTGGGGCCAGGGAACCCTGGTCACCGTCT |
| | | | CCTCA |
| 813 | YANG-1401d | VH domain | QVQLQESGPGLVKPSGTLSLTCVVSGGSFSNTNWWSWVRQPPGK |
| | | amino | GLEWIGEVFHSGSTNYNPSLKSRVTISVDKSKNQFSLNLSSVTA |
| | | acid | ADTAVYYCARGYYGDNWEDSWGQGTLVTVSS |
| | | sequence | |
| 814 | YANG-1401d | HCDR1 | GGSFSNTNW |
| 815 | YANG-1401d | HCDR2 | VFHSGST |
| 816 | YANG-1401d | HCDR3 | ARGYYGDNWEDS |
| 817 | YANG-1401d | VL domain | GACATCCAGATGACCCAGTCTCCATCCTCACTGTCTGCATCTGT |
| | | nucleic | AGGAGACAGAGTCACCATCACTTGTCGGGCGAGTCAGGGTATTA |
| | | acid | GCAGCTGGTTGGCCTGGTATCAGCAGAAACCAGAGAAAGCCCCT |
| | | sequence | AAGGCCCTGATCTATTCTGCATCCACTTTGCAAAGTGGAGTCCC |
| | | | ATCAAGGTTCAGCGGCAGTGGATCTGGGACAGATTTCACTCTCA |
| | | | CCATCAGCAGCCTGCAGCCTGAAGATGTTGCGACTTATTACTGC |
| | | | CAACAGTCTAGTAGTTACCCTCTCACTTTCGGCGGAGGGACCAA |
| | | | GGTCGAGATCAAA |
| 818 | YANG-1401d | VL domain | DIQMTQSPSSLSASVGDRVTITCRASQGISSWLAWYQQKPEKAP |
| | | amino | KALIYSASTLQSGVPSRFSGSGSGTDFTLTISSLQPEDVATYYC |
| | | acid | QQSSSYPLTFGGGTKVEIK |
| | | sequence | |
| 819 | YANG-1401d | LCDR1 | QGISSW |
| 517 | YANG-1401d | LCDR2 | SAS |
| 820 | YANG-1401d | LCDR3 | QQSSSYPLT |
| 821 | YANG-1401e | VH domain | CAGGTGCACCTGCAGGAGTCGGGCCCAGGACTGGTGAAGCCTTC |
| | | nucleic | GGGGACCCTGTCCCTCACCTGCGCTGTCTCTGGTGGCTCCTTCA |
| | | acid | GCCAGATTAACTGGTGGAGTTGGGTCCGCCAGTCCCCAGGAAAG |
| | | sequence | GGGCTGGAGTGGATTGGAGAAATCTATCATAGTGGGAGCACCAA |
| | | | CTACAACCCGTCCCTCAAGAGTCGAGTCACCATGTCCGTAGACA |
| | | | AGTCCAAGAACCACTTCTCCCTGGCGTTGAATTCTGTGACCGCC |
| | | | GCGGACACGGCCGTGTATTATTGTGCGCGGGGGTATTATGGTGA |
| | | | CAACTGGTTCGACTCATGGGGCCAGGGAACCCTGGTCACCGTCT |
| | | | CCTCA |
| 822 | YANG-1401e | VH domain | QVHLQESGPGLVKPSGTLSLTCAVSGGSFSQINWWSWVRQSPGK |
| | | amino | GLEWIGEIYHSGSTNYNPSLKSRVTMSVDKSKNHFSLALNSVTA |
| | | acid | ADTAVYYCARGYYGDNWEDSWGQGTLVTVSS |
| | | sequence | |
| 823 | YANG-1401e | HCDR1 | GGSFSQINW |
| 824 | YANG-1401e | HCDR2 | IYHSGST |
| 825 | YANG-1401e | HCDR3 | ARGYYGDNWEDS |
| 826 | YANG-1401e | VL domain | GACATCCAGATGACCCAGTCTCCATCCTCACTGTCTGCTTCTAT |
| | | nucleic | AGGCGACAGAGTCACCATCACTTGTCGGGCGAGTCAGGGTATTA |
| | | acid | GCAACTGGTTAGTCTGGTATCAGCAGAAACCAGAGAAAGCCCCT |
| | | sequence | AAGTCCCTGATCTATGCTGCTTCCAGTTTGCAAAGTGGGGTCCC |
| | | | ATCACGGTTCAGCGGCAGTGGATCTGGGACAGATTTCACTCTCA |
| | | | CCATCAGCAGCCTGCATCCTGAAGATTTTGCATCTTATTACTGC |
| | | | CAACAGTATAGTGATTACCCTCTCACTTTCGGCGGCGGGACCAG |
| | | | GGTGGAGATCAAA |
| 827 | YANG-1401e | VL domain | DIQMTQSPSSLSASIGDRVTITCRASQGISNWLVWYQQKPEKAP |
| | | amino | KSLIYAASSLQSGVPSRFSGSGSGTDFTLTISSLHPEDFASYYC |
| | | acid | QQYSDYPLTFGGGTRVEIK |
| | | sequence | |
| 828 | YANG-1401e | LCDR1 | QGISNW |
| 18 | YANG-1401e | LCDR2 | AAS |
| 829 | YANG-1401e | LCDR3 | QQYSDYPLT |
| 830 | YANG-1402 | VH domain | GAGGTGCAGCTGGTGGAGTCTGGAGGAGGCTTGATCCAGCCTGG |
| | | nucleic | GGGGTCCCTGAGACTCTCCTGTGCAGCCTCTGGGGTCACCGTCA |
| | | acid | GTAGTAACTACATGAACTGGGTCCGCCAGGCTCCAGGGAAGGGG |
| | | sequence | CTGGAGTGGGTCTCAGTTATTTATAGCGGTGGTAGCACATACTA |
| | | | CGCAGACTCCGTGAAGGGCCGATTCACCATCTCCAGAGACAATT |
| | | | CCAAGAACACGCTGTATCTTCAAATGAACAGCCTAAGAGTCGAG |
| | | | GACACGGCCGTATATTACTGTGCGAGAGACATAGGGGACTACGG |
| | | | TATGGACGTCTGGGGCCAAGGGACCACGGTCACCGTCTCCTCA |
| 831 | YANG-1402 | VH domain | EVQLVESGGGLIQPGGSLRLSCAASGVTVSSNYMNWVRQAPGKG |
| | | amino | LEWVSVIYSGGSTYYADSVKGRFTISRDNSKNTLYLQMNSLRVE |
| | | acid | DTAVYYCARDIGDYGMDVWGQGTTVTVSS |
| | | sequence | |
| 832 | YANG-1402 | HCDR1 | GVTVSSNY |
| 14 | YANG-1402 | HCDR2 | IYSGGST |
| 833 | YANG-1402 | HCDR3 | ARDIGDYGMDV |
| 834 | YANG-1402 | VL domain | GACATCCAGTTGACCCAGGCTCCATCCTTCCTGTCTGCATCTGT |
| | | nucleic | AGGAGACAGACTCACCATCACTTGCTGGGCCAGTCAGGGCATTA |
| | | acid | GCAGTTATTTAGCCTGGTATCAGCAAAAACCAGGGAAAGCCCCT |
| | | sequence | AAGATCCTGATCTATGCTGCATCCACTTTGCAAAGTGGGGTCCC |
| | | | ATCAAGGTTCAGCGGCAGTGGATCTGGGACAGAATTCACTCTCA |
| | | | CAATCAGCAGCCTGCAGCCTGAAGATTTTGCAACTTATTACTGT |
| | | | CAACAGCTTAATAGTTACCCGCTCATTTTCGGCGGAGGGACCAA |
| | | | GGTGGAGATCAAA |
| 835 | YANG-1402 | VL domain | DIQLTQAPSFLSASVGDRLTITCWASQGISSYLAWYQQKPGKAP |
| | | amino | KILIYAASTLQSGVPSRFSGSGSGTEFTLTISSLQPEDFATYYC |
| | | acid | QQLNSYPLIFGGGTKVEIK |
| | | sequence | |
| 8 | YANG-1402 | LCDR1 | QGISSY |
| 18 | YANG-1402 | LCDR2 | AAS |
| 836 | YANG-1402 | LCDR3 | QQLNSYPLI |
| 837 | YANG-1403 | VH domain | CAGGTGCAGCTGGTGGAGTCTGGGGGAGGCGTGGTCCAGCCTGG |
| | | nucleic | GAGGTCCCTGAGACTCTCCTGTGCAGCGTCTGGATTCACCTTCA |
| | | acid | GTAATTATGGCATGCACTGGGTCCGCCAGGCTCCAGGCAAGGGG |
| | | sequence | CTGGAGTGGGTGGCAGTTATATGGTATGATGGAAGTAATAAATA |
| | | | CTATGCAGACTCCGTGAAGGGCCGATTCACCATCTCCAGAGACA |
| | | | ATTCCAAGAACACGCTGTATCTGCAAATGAACAGCCTGAGAGCC |
| | | | GAGGACACGGCTGTTTATTTCTGTGTGAGAGAAACTGTTACGGA |
| | | | CGGTATGGACGTCTGGGGCCAAGGGACCACGGTCACCGTCTCCC |
| | | | TA |
| 838 | YANG-1403 | VH domain | QVQLVESGGGVVQPGRSLRLSCAASGFTFSNYGMHWVRQAPGKG |
| | | amino | LEWVAVIWYDGSNKYYADSVKGRFTISRDNSKNTLYLQMNSLRA |
| | | acid | EDTAVYFCVRETVTDGMDVWGQGTTVTVSL |
| | | sequence | |
| 839 | YANG-1403 | HCDR1 | GFTFSNYG |
| 840 | YANG-1403 | HCDR2 | IWYDGSNK |
| 841 | YANG-1403 | HCDR3 | VRETVTDGMDV |
| 842 | YANG-1403 | VL domain | AACATCCAGATGACCCAGTCTCCATCTGCCATGTCTGCATCTGT |
| | | nucleic | GGGAGACAGAGTCACCATCACTTGTCGGGCGAGGCAGGACATTA |
| | | acid | GCAATTATTTAGCCTGGTTTCAGCAGAAACCAGGGAAAGTCCCT |
| | | sequence | AAGCACCTGATCTATGCTGCATCCAGTTTGCTAAGTGGGGTCCC |
| | | | ATCAAGGTTCAGCGGCAGTGGATCTGGGACAGAATTCACTCTCA |
| | | | CAATCAGCAGCCTGCAGCCTGAAGATTTTGCAACTTATTACTGT |
| | | | CTACACCATAATGGTTACCCGTGGACGTTCGGCCAAGGGACCAA |
| | | | GGTGGAAATCAAA |
| 843 | YANG-1403 | VL domain | NIQMTQSPSAMSASVGDRVTITCRARQDISNYLAWFQQKPGKVP |
| | | amino | KHLIYAASSLLSGVPSRFSGSGSGTEFTLTISSLQPEDFATYYC |
| | | acid | LHHNGYPWTFGQGTKVEIK |
| | | sequence | |
| 844 | YANG-1403 | LCDR1 | QDISNY |
| 18 | YANG-1403 | LCDR2 | AAS |
| 845 | YANG-1403 | LCDR3 | LHHNGYPWT |
| 846 | YANG-2101 | VH domain | GAGGTGCAGCTGGTGGAGTCTGGGGGAGGTTTGGTACAGCCTGG |
| | | nucleic | GGGGTCCCTGAGACTCTCCTGTGCAGCCTCTGGATTCACCTTCA |
| | | acid | GTCTCTACGACATGCACTGGGTCCGTCAAGCAACAGGAAAAGGT |
| | | sequence | CTGGAGTGGGTCGCAGGTGTTGGTATTGCCGGTGACACCATCTA |
| | | | TCCAGACTCCGTGAAGGGCCGATTCACCATCTCCAGAGAGAATG |
| | | | CCAAGAACTCCTTCTTTCTTCAAATGAACAGACTGAGAGCCGGG |
| | | | GACACGGCTGTGTATTACTGTGTAAGAGGAGGAACTGGAACAAC |
| | | | TTTCTTTGATTACTGGGGCCAGGGAGTCCTGGTCACCGTCTCCT |
| | | | CT |
| 847 | YANG-2101 | VH domain | EVQLVESGGGLVQPGGSLRLSCAASGFTFSLYDMHWVRQATGKG |
| | | amino | LEWVAGVGIAGDTIYPDSVKGRFTISRENAKNSFFLQMNRLRAG |
| | | acid | DTAVYYCVRGGTGTTFFDYWGQGVLVTVSS |
| | | sequence | |
| 848 | YANG-2101 | HCDR1 | GFTFSLYD |
| 849 | YANG-2101 | HCDR2 | VGIAGDT |
| 850 | YANG-2101 | HCDR3 | VRGGTGTTFFDY |
| 851 | YANG-2101 | VL domain | GACATCCAGATGACCCAGTCTCCATCTTCACTGTCTGCATCTGT |
| | | nucleic | AGGAGACAGAGTCACCGTCACTTGTCGGGCGAGTCAGGACATTA |
| | | acid | CCAATTATTTAGCCTGGTTTCAGCAGAAACCAGGGAAAGCCCCT |
| | | sequence | AAGTCCCTGATCTATAGTGCATCCAGTTTGCAAGGTGGGACCCC |
| | | | CTCAAAGTTCAGCGGCAGTGGATCTGGGACAGAATTCACTCTCA |
| | | | CCATCAGCAGCCTCCAGCCTGAAGATTTTGCAACTTATTACTGC |
| | | | CAGCAGTATAATAGTTTCCCGCTCACTTTCGGCGGAGGGACCAA |
| | | | GGTGGAGATCAAA |
| 852 | YANG-2101 | VL domain | DIQMTQSPSSLSASVGDRVTVTCRASQDITNYLAWFQQKPGKAP |
| | | amino | KSLIYSASSLQGGTPSKFSGSGSGTEFTLTISSLQPEDFATYYC |
| | | acid | QQYNSFPLTFGGGTKVEIK |
| | | sequence | |
| 853 | YANG-2101 | LCDR1 | QDITNY |
| 517 | YANG-2101 | LCDR2 | SAS |
| 854 | YANG-2101 | LCDR3 | QQYNSFPLT |
| 855 | YANG-2102 | VH domain | GAGGTGAAGCTGGTGGAGTCTGGGGGAGGCTTGGTACAGCGGGG |
| | | nucleic | GGGGTCCCTGAGACTCTCCTGTGCAGCCTCTGGATTCACCTTCA |
| | | acid | GTAGCCACGCCATGTACTGGGTCCGTCAAATTCCAGGAAAAGGT |
| | | sequence | CTGGAGTGGGTCGCAGGTATTGGTGTTGCTGGCGACACATTTTA |
| | | | TCCAGACTCCGTGAAGGGCCGATTCACCATCTCCAGAGAAAATG |
| | | | CCAACAACTCCTTGTCTCTTCAAATGGACAGCCTGAGAACCGGG |
| | | | GACACGGCTATATATTACTGTGTCAGAGATGGTTATAGTGGGAG |
| | | | CTACCCTTACCACTACTACGGTATGGACGTCTGGGGCCAAGGGA |
| | | | TCACGGTCGTCGTCTCCTCA |
| 856 | YANG-2102 | VH domain | EVKLVESGGGLVQRGGSLRLSCAASGFTFSSHAMYWVRQIPGKG |
| | | amino | LEWVAGIGVAGDTFYPDSVKGRFTISRENANNSLSLQMDSLRTG |
| | | acid | DTAIYYCVRDGYSGSYPYHYYGMDVWGQGITVVVSS |
| | | sequence | |
| 857 | YANG-2102 | HCDR1 | GFTFSSHA |
| 858 | YANG-2102 | HCDR2 | IGVAGDT |
| 859 | YANG-2102 | HCDR3 | VRDGYSGSYPYHYYGMDV |
| 860 | YANG-2102 | VL domain | GACATCCAGTTGACCCAGTCTCCATCCTCACTGTCTGCATCTGT |
| | | nucleic | AGGAGACAGTGTCACCATCACTTGTCGGGCGAGTCAGGGCATTG |
| | | acid | ACACTTATTTAGCCTGGTTTCAGCAGAAACCAGGGAAAGCCCCT |
| | | sequence | AAGTCCCTGATCTATGTTGCATCCAGTTTACAGAGTGGGGTCCC |
| | | | ATCAAAATTCAGCGGCAGTGGATCTGGGACAGATTTCACTCTCA |
| | | | CCATCAGCAGCCTGCTGCCTGAAGATTTTGCAACTTATTACTGC |
| | | | CAACAGTATAAGAGTTACCCGTGGACGTTCGGCCAAGGGACCAA |
| | | | GGTGGAGATCAAA |
| 861 | YANG-2102 | VL domain | DIQLTQSPSSLSASVGDSVTITCRASQGIDTYLAWFQQKPGKAP |
| | | amino | KSLIYVASSLQSGVPSKFSGSGSGTDFTLTISSLLPEDFATYYC |
| | | acid | QQYKSYPWTFGQGTKVEIK |
| | | sequence | |
| 862 | YANG-2102 | LCDR1 | QGIDTY |
| 863 | YANG-2102 | LCDR2 | VAS |
| 864 | YANG-2102 | LCDR3 | QQYKSYPWT |
| 865 | YANG-2103 | VH domain | GAGGCGCAGTTGGTGGAGTCTGGAGGAGGCTTGATCCAGTCTGG |
| | | nucleic | GGGGTCCCTGAGACTCTCCTGTATAGCCTCTGGATTAACCGTCA |
| | | acid | ATAGCAACTACATGAACTGGGTCCGCCAGGCTCCAGGGAAGGGA |
| | | sequence | CTGGAGTGGGTCTCAGTTATTTATAGCGGTGGTACCACATTCTA |
| | | | CGCAGACTCCGTGAAGGGCCGATTCACCATCTCCAGAGACAATT |
| | | | CCAAGAACACGCTGTATCTTCAAATGACTAGTCTGAGAGCCGAG |
| | | | GACACGGCCGTGTATTATTGTGCGAGAGAGGGATACGGTATGGA |
| | | | CGTCTGGGGCCAAGGGACCACGGTCACCGTCTCCTCA |
| 866 | YANG-2103 | VH domain | EAQLVESGGGLIQSGGSLRLSCIASGLTVNSNYMNWVRQAPGKG |
| | | amino | LEWVSVIYSGGTTFYADSVKGRFTISRDNSKNTLYLQMTSLRAE |
| | | acid | DTAVYYCAREGYGMDVWGQGTTVTVSS |
| | | sequence | |
| 867 | YANG-2103 | HCDR1 | GLTVNSNY |
| 868 | YANG-2103 | HCDR2 | IYSGGTT |
| 514 | YANG-2103 | HCDR3 | AREGYGMDV |
| 869 | YANG-2103 | VL domain | TCCTATGTGCTGACTCAGCCACCCTCAGTGTCAGTGGCCCCAGG |
| | | nucleic | AAAGACGGCCAGGATAAACTGTGGGGGAAATAATTTTGGAAGTA |
| | | acid | AAAGTGTGCACTGGTACCAGCAGAAGCCAGGCCAGGCCCCTGTG |
| | | sequence | CTGGTCATCTATTATGATAGCGACCGGCCCTCAGGGATCCCTGA |
| | | | GCGATTCTCTGGCTCCAACTCAGGGAACACGGCCACCCTGACCA |
| | | | TCAGCAGGGTCGAAGCCGGGGATGAGGCCGACTATTACTGTCAG |
| | | | GTGTGGGATAATAGTAGTGATCATTTTGTCTTCGGAGCTGGGAC |
| | | | CAAGGTCACCGTCCTA |
| 870 | YANG-2103 | VL domain | SYVLTQPPSVSVAPGKTARINCGGNNFGSKSVHWYQQKPGQAPV |
| | | amino | LVIYYDSDRPSGIPERFSGSNSGNTATLTISRVEAGDEADYYCQ |
| | | acid | VWDNSSDHFVFGAGTKVTVL |
| | | sequence | |
| 871 | YANG-2103 | LCDR1 | NFGSKS |
| 568 | YANG-2103 | LCDR2 | YDS |
| 872 | YANG-2103 | LCDR3 | QVWDNSSDHFV |
| 873 | YANG-2104 | VH domain | GAAGTGAAGTTGGTGGAGTCTGGGGGAGGCTTGGTACAGCCTGG |
| | | nucleic | GGGGTCCCTGAGACTCTCCTGTGCAGCCTCTGGATTCACATTCA |
| | | acid | GTAGCCACGCCATGTACTGGGTCCGTCAAAGTCCAGGAAAAGGT |
| | | sequence | CTGGAGTGGGTCTCAGGTATTGGTGTTGCTGGTGACACATTTTA |
| | | | TGTAGACTCCGTGAAGGGCCGATTCACCATCTCCAGAGAAAATG |
| | | | CCAGGAACTCCTTGTCTCTTCAAATGAACAGCCTGAGAGCCGGG |
| | | | GACACGGCTGTTTATTACTGTGCCAGAGATGGTTATAGTGGGAC |
| | | | CCACCCTTACCACTTCTACGGTATGGACGTCTGGGGCCAAGGGA |
| | | | TCACGGTCGTCGTCTCCTCA |
| 874 | YANG-2104 | VH domain | EVKLVESGGGLVQPGGSLRLSCAASGFTFSSHAMYWVRQSPGKG |
| | | amino | LEWVSGIGVAGDTFYVDSVKGRFTISRENARNSLSLQMNSLRAG |
| | | acid | DTAVYYCARDGYSGTHPYHFYGMDVWGQGITVVVSS |
| | | sequence | |
| 875 | YANG-2104 | HCDR1 | GFTFSSHA |
| 876 | YANG-2104 | HCDR2 | IGVAGDT |
| 877 | YANG-2104 | HCDR3 | ARDGYSGTHPYHFYGMDV |
| 878 | YANG-2104 | VL domain | GACATCCAGATGACCCAGTCTCCATCCTCACTGTCTGCATCTGT |
| | | nucleic | AGGAGACAGTGTCACCATCACTTGTCGGGCGAGTCAGGACATTA |
| | | acid | ACACTTATTTAGCCTGGTTTCAGCAGAAACCAGGGAAAGCCCCT |
| | | sequence | AAGTCCCTGATCTATGTTGCATCCAGTTTACAGAGTGGGGTCCC |
| | | | ATCAAAGTTCAGCGGCAGTGGATCTGGGACAGATTTCACTCTCA |
| | | | CCATCAGCAGCCTGCTGCCTGAAGATTTTGCAACTTATTATTGC |
| | | | CAACAGTATAAAAGTTACCCGTGGACGTTCGGCCAAGGGACCAA |
| | | | GGTGGAGATCAAA |
| 879 | YANG-2104 | VL domain | DIQMTQSPSSLSASVGDSVTITCRASQDINTYLAWFQQKPGKAP |
| | | amino | KSLIYVASSLQSGVPSKFSGSGSGTDFTLTISSLLPEDFATYYC |
| | | acid | QQYKSYPWTFGQGTKVEIK |
| | | sequence | |
| 880 | YANG-2104 | LCDR1 | QDINTY |
| 863 | YANG-2104 | LCDR2 | VAS |
| 881 | YANG-2104 | LCDR3 | QQYKSYPWT |
| 882 | YANG-2105 | VH domain | GAGGTGCAACTGGTGGAGTCTGGAGGAGGCTTGATCCAGCCTGG |
| | | nucleic | GGGGTCCCTGAGACTCTCCTGTGCAGCCTCTGGGCTCACCGTCA |
| | | acid | GTAGCAATTACATGAACTGGGTCCGCCAGGCTCCAGGGAAGGGG |
| | | sequence | CTGGAGTGGGTCTCAGTTATTTATAGCGGTGGTAGTACATTCTA |
| | | | CACAGATTCCGTGAAGGGCCGATTCACCATCTCCAGAGACAACT |
| | | | CCAAGAACACGCTGAATCTTCAAATGAACAGTCTGCGAGCCGAG |
| | | | GACACGGCCGTGTATTATTGTGCGAGAGATCTGGGGATACGCGG |
| | | | GGGTATGGACGTCTGGGGCCAAGGGACCACGGTCACCGTCTCCT |
| | | | CA |
| 883 | YANG-2105 | VH domain | EVQLVESGGGLIQPGGSLRLSCAASGLTVSSNYMNWVRQAPGKG |
| | | amino | LEWVSVIYSGGSTFYTDSVKGRFTISRDNSKNTLNLQMNSLRAE |
| | | acid | DTAVYYCARDLGIRGGMDVWGQGTTVTVSS |
| | | sequence | |
| 172 | YANG-2105 | HCDR1 | GLTVSSNY |
| 14 | YANG-2105 | HCDR2 | IYSGGST |
| 884 | YANG-2105 | HCDR3 | ARDLGIRGGMDV |
| 885 | YANG-2105 | VL domain | GACATCCAGTTGATCCAGTCTCCATCCTTCCTGTCTGCATCTGT |
| | | nucleic | AGGAGACAGAGTCACCATCACTTGCTGGGCCAGTCAGGGCATTA |
| | | acid | GTAGTTATTTAGCCTGGTATCAGCAAAAACCAGGGAAAGCCCCT |
| | | sequence | AACCTCCTGATCTATGCTGCATCCACTTTGCAAAGTGGGGTCCC |
| | | | ATCAAGGTTCAGCGGCAGTGGATCTGGGACAGAGTTCACTCTCA |
| | | | CAATCAGCAGCCTGCAGCCTGAGGATTTTGCAACTTATTACTGT |
| | | | CAACAGCTTGATGGTTCCCTCACTTTCGGCGGAGGGACCAAGGT |
| | | | GGAGATCAAA |
| 886 | YANG-2105 | VL domain | DIQLIQSPSFLSASVGDRVTITCWASQGISSYLAWYQQKPGKAP |
| | | amino | NLLIYAASTLQSGVPSRFSGSGSGTEFTLTISSLQPEDFATYYC |
| | | acid | QQLDGSLTFGGGTKVEIK |
| | | sequence | |
| 8 | YANG-2105 | LCDR1 | QGISSY |
| 18 | YANG-2105 | LCDR2 | AAS |
| 887 | YANG-2105 | LCDR3 | QQLDGSLT |
| 888 | YANG-2106 | VH domain | CAGGTGCAGGTAGTGGAGTCTGGGGGAGGCGTGGTCCAGCCTGG |
| | | nucleic | GAGGTCCCTGAGACTCTCCTGTTCAGCGTCTGGATTCACCTTCA |
| | | acid | GCACCTATGGCATGCACTGGGTCCGCCAGGCTCCAGGCAAGGGG |
| | | sequence | CTGGAGTGGGTGGCAGTTATATGGTATGATGGAAGTAATAAGTA |
| | | | CTATGCAGACTCCGTGAAGGGCCGATTCATCATCTCCAGAGACA |
| | | | ATTCCAAGAACACGCTGTATCTGCAAATGAGCAGTCTGAGACCC |
| | | | GATGACACGGCTGTGTATTATTGTGTGAGAGAGGGAGTGGCTGA |
| | | | CGGTATGGGCGTCTGGGGCCAAGGGACCACAGTCACCGTCTCTT |
| | | | CA |
| 889 | YANG-2106 | VH domain | QVQVVESGGGVVQPGRSLRLSCSASGFTFSTYGMHWVRQAPGKG |
| | | amino | LEWVAVIWYDGSNKYYADSVKGRFIISRDNSKNTLYLQMSSLRP |
| | | acid | DDTAVYYCVREGVADGMGVWGQGTTVTVSS |
| | | sequence | |
| 890 | YANG-2106 | HCDR1 | GFTFSTYG |
| 891 | YANG-2106 | HCDR2 | IWYDGSNK |
| 892 | YANG-2106 | HCDR3 | VREGVADGMGV |
| 893 | YANG-2106 | VL domain | AACATCCAGATGACCCAGTCTCCATCTGCCATGTCTGCATCTGT |
| | | nucleic | GGGAGACAGAGTCACCATCACTTGTCGGGCGAGGCAGGACATTA |
| | | acid | GCACTTACTTAGCCTGGTTTCAGCAGAAACCAGGGAAAGTCCCT |
| | | sequence | AAGCACCTGATCTATGCTGCGTCTACTTTGCTAAGTGGGGTCCC |
| | | | ATCAAGGTTCGGCGGCAGTGGTTCTGGGACAGAATTCACTCTCA |
| | | | CAATCACCAGCCTGCAGCCTGAAGATTTTGCAACTTATTACTGT |
| | | | CTACACCATAATAATTATCCGTGGACGTTCGGCCAAGGGACCAA |
| | | | GGTGGAAATCAAA |
| 894 | YANG-2106 | VL domain | NIQMTQSPSAMSASVGDRVTITCRARQDISTYLAWFQQKPGKVP |
| | | amino | KHLIYAASTLLSGVPSRFGGSGSGTEFTLTITSLQPEDFATYYC |
| | | acid | LHHNNYPWTFGQGTKVEIK |
| | | sequence | |
| 895 | YANG-2106 | LCDR1 | QDISTY |
| 18 | YANG-2106 | LCDR2 | AAS |
| 896 | YANG-2106 | LCDR3 | LHHNNYPWT |
| 897 | YANG-2107 | VH domain | CAGGTGCAGCTGCAGGAGTCGGGCCCAGGACTGGTGAAGCCTTC |
| | | nucleic | GGGGACCCTGTCCCTCACCTGCGCTGTCTCTGGTGGCTCCATTA |
| | | acid | GAAGTAGTAACTGGTGGATTTGGGTCCGCCAGTCCCCAGGGAAG |
| | | sequence | GGGCTGGAGTGGATTGGGGAAATCTATCATGGTGGGAATACCAA |
| | | | CTATAACCCGTCCCTCAAGAGTCGAGTCACCTTGTCAGTAGACA |
| | | | AGTCCAAGAACCAGTTCTCCCTGAAGCTGAGTTCTGTGACCGCC |
| | | | GCGGACACGGCCGTATATTATTGTGCGAGAGCTCTTTACGATAT |
| | | | CGGGGGAGTTTTTGATATTTGGGGCCAGGGGACTATGGTCACCG |
| | | | TCTCTTCA |
| 898 | YANG-2107 | VH domain | QVQLQESGPGLVKPSGTLSLTCAVSGGSIRSSNWWIWVRQSPGK |
| | | amino | GLEWIGEIYHGGNTNYNPSLKSRVTLSVDKSKNQFSLKLSSVTA |
| | | acid | ADTAVYYCARALYDIGGVFDIWGQGTMVTVSS |
| | | sequence | |
| 899 | YANG-2107 | HCDR1 | GGSIRSSNW |
| 900 | YANG-2107 | HCDR2 | IYHGGNT |
| 901 | YANG-2107 | HCDR3 | ARALYDIGGVFDI |
| 902 | YANG-2107 | VL domain | CAGTCTGCCCTGACTCAGCCTGCCTCCGTGTCGGGGTCTCCTGG |
| | | nucleic | ACAGTCGATCTCCATCTCCTGCACTGGAACCAGCAGTGATATTG |
| | | acid | GTGGTTATAACTATGTCTCCTGGTACCAACAGCACCCAGGCAAA |
| | | sequence | GCCCCCAAACTCATGATTTATGATGTCAGTGAGCGGCCCTCAGG |
| | | | GGTTTCTAATCGCTTCTCTGGCTCCAAGTCTGGCAACACGGCCT |
| | | | CCCTGACAATCTCTGGGCTCCAGGCTGAGGACGAGGGTGATTAT |
| | | | TACTGCTGCTCATATGCAGCTAATAGTAATGTGGTATTCGGCGG |
| | | | AGGGACCAAACTGTCCGTCCTA |
| 903 | YANG-2107 | VL domain | QSALTQPASVSGSPGQSISISCTGTSSDIGGYNYVSWYQQHPGK |
| | | amino | APKLMIYDVSERPSGVSNRFSGSKSGNTASLTISGLQAEDEGDY |
| | | acid | YCCSYAANSNVVFGGGTKLSVL |
| | | sequence | |
| 904 | YANG-2107 | LCDR1 | SSDIGGYNY |
| 203 | YANG-2107 | LCDR2 | DVS |
| 905 | YANG-2107 | LCDR3 | CSYAANSNVV |
| 906 | YANG-2108 | VH domain | CAGGTGCAGCTGCAGGAGTCGGGCCCAGGACAGGTGAAGCCTTC |
| | | nucleic | GGGGACCCTGTCCCTCACCTGCGCTGTCTCTGGTGGCTCCATCA |
| | | acid | GAAGTAGTAACTGGTGGATTTGGGTCCGCCAGCCCCCAGGGAAG |
| | | sequence | GGTCTGGAGTGGATTGGGGAAATCTATCATGGTGGAAACACCAA |
| | | | CTACAGCCCGTCCCTCAAGAGTCGAGTCTCCATATCAGTAGACA |
| | | | AGTCCAAGAACCACTTCTCCCTGAACCTGACCTCTGTGACCGCC |
| | | | GCGGACACGGCCGTATATTACTGTGCGAGAGCTCTTTACGATGT |
| | | | CGGGGGAGTTTTTGATATTTGGGGCCAAGGGACTATGGTCACCG |
| | | | TCTCTTCA |
| 907 | YANG-2108 | VH domain | QVQLQESGPGQVKPSGTLSLTCAVSGGSIRSSNWWIWVRQPPGK |
| | | amino | GLEWIGEIYHGGNTNYSPSLKSRVSISVDKSKNHFSLNLTSVTA |
| | | acid | ADTAVYYCARALYDVGGVFDIWGQGTMVTVSS |
| | | sequence | |
| 908 | YANG-2108 | HCDR1 | GGSIRSSNW |
| 909 | YANG-2108 | HCDR2 | IYHGGNT |
| 910 | YANG-2108 | HCDR3 | ARALYDVGGVEDI |
| 911 | YANG-2108 | VL domain | CAGTCTGCCCTGACTCAGCCTGCCTCCGTGTCGGGGTCTCCTGG |
| | | nucleic | ACAGTCGATCACCATCTCCTGCACTGGAAGCAGCAGTGATGTTG |
| | | acid | GTGGTTATAATTATGTCTCCTGGTACCAACAGCACCCAGGCAAA |
| | | sequence | GCCCCCAAACTCATGATTTATGATGTCAGTGAGCGGCCCTCAGG |
| | | | GGTTTCTAATCGCTTCTCTGGCTCCAAGTCTGGCAACACGGCCT |
| | | | CCCTGACAATCTCTGGGCTCCAGGCTGAGGACGAGGGTGATTAT |
| | | | TACTGCTGCTCATATGCAGCTAATAGCAATGTGGTATTCGGCGG |
| | | | AGGGACCAAACTGTCCGTCCTA |
| 912 | YANG-2108 | VL domain | QSALTQPASVSGSPGQSITISCTGSSSDVGGYNYVSWYQQHPGK |
| | | amino | APKLMIYDVSERPSGVSNRFSGSKSGNTASLTISGLQAEDEGDY |
| | | acid | YCCSYAANSNVVFGGGTKLSVL |
| | | sequence | |
| 913 | YANG-2108 | LCDR1 | SSDVGGYNY |
| 203 | YANG-2108 | LCDR2 | DVS |
| 914 | YANG-2108 | LCDR3 | CSYAANSNVV |
| 915 | YANG-2108a | VH domain | CAGGTGCAGCTGCAGGAGTCGGGCCCAGGACAGGTGAAGCCTTC |
| | | nucleic | GGGGACCCTGTCCCTCACCTGCGCTGTCTCTGGAGGCTCCATCA |
| | | acid | GAAGTAGTAACTGGTGGATTTGGGTCCGCCAGTCCCCCGGGAAG |
| | | sequence | GGTCTGGAGTGGATTGGGGAAATCTATCATGGTGGGAACACCAA |
| | | | CTACAATCCGTCCCTCAAGAGTCGACTCACCATATCAATAGACA |
| | | | AGTCCAAGAACCACTTCTCCATGAAGCTGCACTCTGTGACCGCC |
| | | | GCGGACACGGCCGTATATTACTGTGCGAGAACTCTTTACGATAT |
| | | | CGGGGGAGTTTTTGATATTTGGGGCCAAGGGACTTTGGTCACCG |
| | | | TCTCTTCA |
| 916 | YANG-2108a | VH domain | QVQLQESGPGQVKPSGTLSLTCAVSGGSIRSSNWWIWVRQSPGK |
| | | amino | GLEWIGEIYHGGNTNYNPSLKSRLTISIDKSKNHFSMKLHSVTA |
| | | acid | ADTAVYYCARTLYDIGGVFDIWGQGTLVTVSS |
| | | sequence | |
| 917 | YANG-2108a | HCDR1 | GGSIRSSNW |
| 918 | YANG-2108a | HCDR2 | IYHGGNT |
| 919 | YANG-2108a | HCDR3 | ARTLYDIGGVFDI |
| 920 | YANG-2108a | VL domain | CAGTCTGCCCTGACTCAGCCTGCCTCCGTGTCGGGGTCTCCTGG |
| | | nucleic | ACAGTCGATCACCATCTCCTGCACTGGAACCAGCAGTGATGTTG |
| | | acid | GTGGTTATAACTATGTCTCCTGGTACCAACACCACCCAGGCAAA |
| | | sequence | GCCCCCAAACTCATGATTTATGATGTTAGTGAGCGGCCCTCAGG |
| | | | GGTTTCTAATCGCTTCTCTGGCTCCAAGTCTGGCAACACGGCCT |
| | | | CCCTGACAATCTCTGGGCTCCAGGCTGAGGACGAGGGTGATTAT |
| | | | TACTGCTGCTCATATGCAGCTAATAGCAATGTGGTATTCGGCGG |
| | | | AGGGACCAAACTGTCCGTCCTA |
| 921 | YANG-2108a | VL domain | QSALTQPASVSGSPGQSITISCTGTSSDVGGYNYVSWYQHHPGK |
| | | amino | APKLMIYDVSERPSGVSNRFSGSKSGNTASLTISGLQAEDEGDY |
| | | acid | YCCSYAANSNVVFGGGTKLSVL |
| | | sequence | |
| 922 | YANG-2108a | LCDR1 | SSDVGGYNY |
| 203 | YANG-2108a | LCDR2 | DVS |
| 923 | YANG-2108a | LCDR3 | CSYAANSNVV |
| 924 | YANG-2108b | VH domain | CAGGTGCAGCTGCAGGAGTCGGGCCCAGGACTGGTGAAGCCTTC |
| | | nucleic | GGGGACCCTGTCCCTCACCTGCGCTGTCTCTGGTGGTTCCATTA |
| | | acid | GAAGTAGTAACTGGTGGATTTGGGTCCGCCAGTCCCCAGGGAAG |
| | | sequence | GGGCTGGAGTGGATTGGGGAAATCTATCATGGTGGGAATACCAA |
| | | | CTATAACCCGTCCCTCAAGAGTCGAGTCACCATGTCAGTAGACA |
| | | | AGTCCAAGAACCAGTTCTCCCTGAAGCTGAGTTCTGTGACCGCC |
| | | | GCGGACACGGCCGTATATTACTGTGCGAGACCTCTTTACGATAT |
| | | | CGGGGGAGTTTTTGATATTTGGGGCCAGGGGACTATGGTCACCG |
| | | | TCTCTTCA |
| 925 | YANG-2108b | VH domain | QVQLQESGPGLVKPSGTLSLTCAVSGGSIRSSNWWIWVRQSPGK |
| | | amino | GLEWIGEIYHGGNTNYNPSLKSRVTMSVDKSKNQFSLKLSSVTA |
| | | acid | ADTAVYYCARPLYDIGGVFDIWGQGTMVTVSS |
| | | sequence | |
| 926 | YANG-2108b | HCDR1 | GGSIRSSNW |
| 927 | YANG-2108b | HCDR2 | IYHGGNT |
| 928 | YANG-2108b | HCDR3 | ARPLYDIGGVFDI |
| 929 | YANG-2108b | VL domain | CAGTCTGCCCTGACTCAGCCTGCCTCCGTGTCGGGGTCTCCTGG |
| | | nucleic | ACAGTCGATCTCCATCTCCTGCACTGGAACCAACAGTGATATTG |
| | | acid | GTGGTTATAACTATGTCTCCTGGTACCAACAGCACCCAGGCAAA |
| | | sequence | GCCCCCAAACTCATGATTTATGATGTCAGTGAGCGGCCCTCAGG |
| | | | GGTTTCTAATCGCTTCTCTGGCTCCAAGTCTGGCAACACGGCCT |
| | | | CCCTGACAATCTCTGGGCTCCAGGCTGAGGACGAGGGTGATTAT |
| | | | TACTGCTGCTCATATGCAAGTAATAGTAATGTGGTATTCGGCGG |
| | | | AGGGACCAAACTGTCCGTCCTA |
| 930 | YANG-2108b | VL domain | QSALTQPASVSGSPGQSISISCTGINSDIGGYNYVSWYQQHPGK |
| | | amino | APKLMIYDVSERPSGVSNRFSGSKSGNTASLTISGLQAEDEGDY |
| | | acid | YCCSYASNSNVVFGGGTKLSVL |
| | | sequence | |
| 931 | YANG-2108b | LCDR1 | NSDIGGYNY |
| 203 | YANG-2108b | LCDR2 | DVS |
| 932 | YANG-2108b | LCDR3 | CSYASNSNVV |
| 933 | YANG-2108c | VH domain | CAGGTGCAGCTGCAGGAGTCGGGCCCAGGACAGGTGAAGCCTTC |
| | | nucleic | GGGGACCCTGTCCCTCACCTGCGCTGTCTCTGGTGGCTCCATCA |
| | | acid | GAAGTAGTAACTGGTGGATTTGGGTCCGCCAGCCCCCAGGGAAG |
| | | sequence | GGTCTGGAGTGGATTGGGGAAATCTATCATGGTGGGAATACCAA |
| | | | CTACAAGCCGTCCCTCAAGAGTCGAGTCACCATATCAGTTGACA |
| | | | AGTCCAAGAACCAGTTCTCCCTCCAGTTGACTTCTGTGACCGCC |
| | | | GCGGACACGGCCGTATACTACTGTGCGAGAGCTCTTTATGATAT |
| | | | CGGGGGAGTTTTTGATATTTGGGGCCAAGGGACGATGGTCACCG |
| | | | TCTCTTCA |
| 934 | YANG-2108c | VH domain | QVQLQESGPGQVKPSGTLSLTCAVSGGSIRSSNWWIWVRQPPGK |
| | | amino | GLEWIGEIYHGGNTNYKPSLKSRVTISVDKSKNQFSLQLTSVTA |
| | | acid | ADTAVYYCARALYDIGGVFDIWGQGTMVTVSS |
| | | sequence | |
| 935 | YANG-2108c | HCDR1 | GGSIRSSNW |
| 936 | YANG-2108c | HCDR2 | IYHGGNT |
| 937 | YANG-2108c | HCDR3 | ARALYDIGGVEDI |
| 938 | YANG-2108c | VL domain | CAGTCTGCCCTGACTCAGCCTGCCTCCGTGTCGGGGTCTCCTGG |
| | | nucleic | ACAGTCGATCACCATCTCCTGCACTGGAACCAGCAGTGATGTTG |
| | | acid | GTGGTTATAACTATGTCTCCTGGTACCAACAGTATCCAGGCAAA |
| | | sequence | GCCCCCAAACTCATGATTTATGATGTCAGTGAGCGGCCCTCAGG |
| | | | GGTTTCTAATCGCTTCTCTGGCTCCAAGTCTGGCAACACGGCCT |
| | | | CCCTGACAATCTCTGGGCTCCAGGCTGAGGACGAGGGTGATTAT |
| | | | TACTGCTGCTCATATGCAACTAATAGCAATGTGGTATTCGGCGG |
| | | | AGGGACCAAACTGTCCGTCCTA |
| 939 | YANG-2108c | VL domain | QSALTQPASVSGSPGQSITISCTGTSSDVGGYNYVSWYQQYPGK |
| | | amino | APKLMIYDVSERPSGVSNRFSGSKSGNTASLTISGLQAEDEGDY |
| | | acid | YCCSYATNSNVVFGGGTKLSVL |
| | | sequence | |
| 940 | YANG-2108c | LCDR1 | SSDVGGYNY |
| 203 | YANG-2108c | LCDR2 | DVS |
| 941 | YANG-2108c | LCDR3 | CSYATNSNVV |
| 942 | YANG-2108d | VH domain | CAGGTGCAGCTGCAGGAGTCGGGCCCAGGACTGGTGAAGCCTTC |
| | | nucleic | GGGGACCCTGTCCCTCACCTGCGCTGTCTCTGGTGGCTCCATTA |
| | | acid | GAAGTAGTAACTGGTGGATTTGGGTCCGCCAGTCCCCAGGGAAG |
| | | sequence | GGACTGGAGTGGATTGGGGAAATCTATCATGGTGGGAATACCAA |
| | | | GTATAATCCGTCCCTCAAGAGTCGAGTCACCATGTCAGTAGACA |
| | | | AGTCCAAGAACCAGTTCTCCCTGAAGCTGAGTTCTGTGACCGCC |
| | | | GCGGACACGGCCGTATATTACTGTGCGAGAGCTCTTTACGATAT |
| | | | CGGGGGAGTTTTTGATATTTGGGGCCAGGGGACTATGGTCACCG |
| | | | TCTCTTCA |
| 943 | YANG-2108d | VH domain | QVQLQESGPGLVKPSGTLSLTCAVSGGSIRSSNWWIWVRQSPGK |
| | | amino | GLEWIGEIYHGGNTKYNPSLKSRVTMSVDKSKNQFSLKLSSVTA |
| | | acid | ADTAVYYCARALYDIGGVFDIWGQGTMVTVSS |
| | | sequence | |
| 944 | YANG-2108d | HCDR1 | GGSIRSSNW |
| 945 | YANG-2108d | HCDR2 | IYHGGNT |
| 946 | YANG-2108d | HCDR3 | ARALYDIGGVFDI |
| 947 | YANG-2108d | VL domain | CAGTCTGCCCTGACTCAGCCTGCCTCCGTGTCGGGGTCTCCTGG |
| | | nucleic | ACAGTCGATCTCCATCTCCTGCACTGGAACCAGCAGTAATATTG |
| | | acid | GTGGTTATAACTATGTCTCCTGGTACCAACAGCACCCAGGCAAA |
| | | sequence | GCCCCCAAACTCATGATTTATGATGTCAGTGAGCGGCCCTCAGG |
| | | | GGTTTCTAATCGCTTCTCTGGCTCCAAGTCTGGCAACACGGCCT |
| | | | CCCTGACAATCTCTGGGCTCCAGGCTGAGGACGAGGGTGATTAT |
| | | | TACTGCTGCTCATATGGAAGTAATAGTAATGTGGTTTTCGGCGG |
| | | | AGGGACCAAACTGTCCGTCCTA |
| 948 | YANG-2108d | VL domain | QSALTQPASVSGSPGQSISISCTGTSSNIGGYNYVSWYQQHPGK |
| | | amino | APKLMIYDVSERPSGVSNRFSGSKSGNTASLTISGLQAEDEGDY |
| | | acid | YCCSYGSNSNVVFGGGTKLSVL |
| | | sequence | |
| 949 | YANG-2108d | LCDR1 | SSNIGGYNY |
| 203 | YANG-2108d | LCDR2 | DVS |
| 950 | YANG-2108d | LCDR3 | CSYGSNSNVV |
| 951 | YANG-2108e | VH domain | CAGGTGCAGCTGCAGGAGTCGGGCCCAGGACAGGTGAAGCCTTC |
| | | nucleic | GGGGACCCTGTCCCTCACCTGCGCTGTCTCTGGTGGCTCCATCA |
| | | acid | GAAGTAGTAACTGGTGGATTTGGGTCCGCCAGTCCCCCGGGAAG |
| | | sequence | GGTCTGGAGTGGATTGGGGAAATCTATCATGGTGGGAACACCAA |
| | | | CTACAACCCGTCCCTCAAGAGTCGACTCACCATATCAGTAGACA |
| | | | AGTCCAAGAACCAGTTCTCCATGAAGCTGAGCTCTGTGACCGCC |
| | | | GCGGACACGGCCGTATATTACTGTGCGAGAGCTCTTTACGATAT |
| | | | CGGGGGAGTTTTTGATATTTGGGGCCAAGGGACTATGGTCACCG |
| | | | TCTCTTCA |
| 952 | YANG-2108e | VH domain | QVQLQESGPGQVKPSGTLSLTCAVSGGSIRSSNWWIWVRQSPGK |
| | | amino | GLEWIGEIYHGGNTNYNPSLKSRLTISVDKSKNQFSMKLSSVTA |
| | | acid | ADTAVYYCARALYDIGGVFDIWGQGTMVTVSS |
| | | sequence | |
| 953 | YANG-2108e | HCDR1 | GGSIRSSNW |
| 954 | YANG-2108e | HCDR2 | IYHGGNT |
| 955 | YANG-2108e | HCDR3 | ARALYDIGGVFDI |
| 956 | YANG-2108? | VL domain | CAGTCTGCCCTGACTCAGCCTGCCTCCGTGTCGGGGTCTCCTGG |
| | | nucleic | ACAGTCGATCACCATCTCCTGCACTGGAACCAGCAGTGATGTTG |
| | | acid | GTGGTTATAACTATGTCTCCTGGTACCAACAGCACACAGGCAAA |
| | | sequence | GCCCCCAAATTCATGATTTATGATGTTAGTGAGCGGCCCTCAGG |
| | | | GGTTTCTAATCGCTTCTCTGGCTCCAAGTCTGGCAACACGGCCT |
| | | | CCCTGACAATCTCTGGGCTCCAGGCTGAGGACGAGGGTGATTAT |
| | | | TACTGCTGCTCATATGCAGCTGATAGCAATGTGGTTTTCGGCGG |
| | | | AGGGACCAAACTGTCCGTCCTA |
| 957 | YANG-2108? | VL domain | QSALTQPASVSGSPGQSITISCTGTSSDVGGYNYVSWYQQHTGK |
| | | amino | APKFMIYDVSERPSGVSNRFSGSKSGNTASLTISGLQAEDEGDY |
| | | acid | YCCSYAADSNVVFGGGTKLSVL |
| | | sequence | |
| 958 | YANG-2108e | LCDR1 | SSDVGGYNY |
| 203 | YANG-2108e | LCDR2 | DVS |
| 959 | YANG-2108e | LCDR3 | CSYAADSNVV |
| 960 | YANG-2108f | VH domain | CAAATGCAGCTGCAGGAGTCGGGCCCAGGACTGGTGAAGCCTTC |
| | | nucleic | GGGGACCCTGTCCCTCACCTGCGCTGTCTCTGGTGGCTCCATCA |
| | | acid | GAAGTAGTAACTGGTGGATTTGGGTCCGCCAGCCCCCAGGGAAG |
| | | sequence | GGACTGGAGTGGATTGGGGAAATCTCTCACGGTGGGAACACCAA |
| | | | CTACAACCCGTCCCTCAAAAGTCGAGTCACCATAACTGTAGACA |
| | | | AGTCCAAGAACCAGTTCTCCCTGAAACTGCCCTCTATGACCGCC |
| | | | GCGGACACGGCCATATATTACTGTGCGAGAGCTCTTTACGATAT |
| | | | CGGGGGAGTCTTTGATATTTGGGGCCCAGGGACTATGGTCACCG |
| | | | TCTCTTCA |
| 961 | YANG-2108f | VH domain | QMQLQESGPGLVKPSGTLSLTCAVSGGSIRSSNWWIWVRQPPGK |
| | | amino | GLEWIGEISHGGNTNYNPSLKSRVTITVDKSKNQFSLKLPSMTA |
| | | acid | ADTAIYYCARALYDIGGVFDIWGPGTMVTVSS |
| | | sequence | |
| 962 | YANG-2108f | HCDR1 | GGSIRSSNW |
| 963 | YANG-2108f | HCDR2 | ISHGGNT |
| 964 | YANG-2108f | HCDR3 | ARALYDIGGVEDI |
| 965 | YANG-2108f | VL domain | CAGTCTGCCCTGACTCAGCCTGCCTCCGTGTCGGGGTCTCCTGG |
| | | nucleic | ACAGTCGATCACCATGTCCTGCACTGGAACCAACAGTGATGTTG |
| | | acid | GTGGTTACAACTATGTCTCCTGGTACCAACAGCACCCAGGCAAA |
| | | sequence | GCCCCCAAACTCATGATTTATGATGTCAGTGAGCGGCCCTCAGG |
| | | | ACTTTCTAATCGCTTCTCTGGCTCCAAGTCTGGCAATACGGCCT |
| | | | CCCTGACAATCTCTGGGCTCCAGGCTGAGGACGAGGGTGATTAT |
| | | | TACTGCTGCTCATTTGCAGCTAATAGCAATGTGGTTTTCGGCGG |
| | | | GGGGACCAAGTTGTCCGTCCTA |
| 966 | YANG-2108f | VL domain | QSALTQPASVSGSPGQSITMSCTGTNSDVGGYNYVSWYQQHPGK |
| | | amino | APKLMIYDVSERPSGLSNRFSGSKSGNTASLTISGLQAEDEGDY |
| | | acid | YCCSFAANSNVVFGGGTKLSVL |
| | | sequence | |
| 967 | YANG-2108f | LCDR1 | NSDVGGYNY |
| 203 | YANG-2108f | LCDR2 | DVS |
| 968 | YANG-2108f | LCDR3 | CSFAANSNVV |
| 2369 | YANG-2108g | VH domain | CAGGTGCAGCTGCAGCAGTCGGGCCCAGGACTGCTGAAGCCTTC |
| | | nucleic | GGGGACCCTGTCCCTCACCTGCGCTGTCTCTGGTGGCTCCATCA |
| | | acid | GAAGTAGTAACTGGTGGATTTGGGTCCGCCAGTCCCCAGGGAAG |
| | | sequence | GGGCTGGAGTGGATTGGGGAAATCTATCATGGTGGGAACACCAA |
| | | | TTACAACCCGTCCCTCAAGAGTCGAGTCACCATATCAGTCGACA |
| | | | AGTCCAAGCACCAGTTCTCCCTGAAGCTGACCTCTGTGACCGCC |
| | | | GCGGACACGGCCGTCTATTACTGTGCGAGAGCTCTTTACGATAT |
| | | | CGGGGGAGTTTTTGATCTTTGGGGCCAAGGGACTATGGTCACCG |
| | | | TCTCTTCA |
| 2370 | YANG-2108g | VH domain | QVQLQQSGPGLLKPSGTLSLTCAVSGGSIRSSNWWIWVRQSPGK |
| | | amino | GLEWIGEIYHGGNTNYNPSLKSRVTISVDKSKHQFSLKLTSVTA |
| | | acid | ADTAVYYCARALYDIGGVEDLWGQGTMVTVSS |
| | | sequence | |
| 969 | YANG-2108g | HCDR1 | GGSIRSSNW |
| 970 | YANG-2108g | HCDR2 | IYHGGNT |
| 971 | YANG-2108g | HCDR3 | ARALYDIGGVEDL |
| 972 | YANG-2108g | VL domain | CAGTCTGCCCTGACTCAGCCTGCCTCCGTGTCGGGGTCTCCTGG |
| | | nucleic | ACAGTCGATCACCATCTCCTGCACTGGAACCAGCAGTGATGTTG |
| | | acid | GTGGTTATAACTATGTCTCCTGGTACCAACAACACCCAGGCAAA |
| | | sequence | GCCCCCAAACTCATGATTTATGATGTCAGTGAGCGGCCCTCAGG |
| | | | GGTTTCTAATCGCTTCTCTGGCTCCAAGTCTGGCAACACGGCCT |
| | | | CCCTGACAATCTCTGGGCTCCAGGCTGAGGACGAGGGTGATTAT |
| | | | TACTGCTGCTCATATGCAGCTAATAGCAGTGTTGTATTCGGCGG |
| | | | AGGGACCAAACTGTCCGTCCTA |
| 973 | YANG-2108g | VL domain | QSALTQPASVSGSPGQSITISCTGTSSDVGGYNYVSWYQQHPGK |
| | | amino | APKLMIYDVSERPSGVSNRFSGSKSGNTASLTISGLQAEDEGDY |
| | | acid | YCCSYAANSSVVFGGGTKLSVL |
| | | sequence | |
| 974 | YANG-2108g | LCDR1 | SSDVGGYNY |
| 203 | YANG-2108g | LCDR2 | DVS |
| 975 | YANG-2108g | LCDR3 | CSYAANSSVV |
| 976 | YANG-2108h | VH domain | CAGGTACAGCTGCAGGAGTCGGGCCCAGGACTGGTGAAGCCTTC |
| | | nucleic | GGGGACCCTGTCCCTCACCTGTGCTGTCTCTGGTGGCTCCATCA |
| | | acid | GAAGTAGTAACTGGTGGATTTGGGTCCGCCAGCCCCCAGGGAAG |
| | | sequence | GGGCTGGAGTGGATTGGGGAAATCTATCATGGTGGGAACACCAA |
| | | | CTACAACCCGTCCCTCCAGAGTCGAGTCACCATATCAGTAGACA |
| | | | AGTCCAAGAACCAGTTCTCCCTGAATCTGAGTTCTGTGACCGCC |
| | | | GCGGACACGGCCGTATATTACTGTGCGAGAGCTCTTTACGATAT |
| | | | CGGGGGAGTTTTTGATATTTGGGGCCAAGGGACTTTGGTCACCG |
| | | | TCTCTTCA |
| 977 | YANG-2108h | VH domain | QVQLQESGPGLVKPSGTLSLTCAVSGGSIRSSNWWIWVRQPPGK |
| | | amino | GLEWIGEIYHGGNTNYNPSLQSRVTISVDKSKNQFSLNLSSVTA |
| | | acid | ADTAVYYCARALYDIGGVFDIWGQGTLVTVSS |
| | | sequence | |
| 978 | YANG-2108h | HCDR1 | GGSIRSSNW |
| 979 | YANG-2108h | HCDR2 | IYHGGNT |
| 980 | YANG-2108h | HCDR3 | ARALYDIGGVFDI |
| 981 | YANG-2108h | VL domain | CAGTCTGCCCTGACTCAGCCTGCCTCCGTGTCGGGGTCTCCTGG |
| | | nucleic | ACAGTCGACCACCATCTCCTGCACTGGAACCAGCAGTGATGTTG |
| | | acid | GTGGTTATAACTATGTCTCCTGGTACCAACAACACCCAGGCAAA |
| | | sequence | GCCCCCAAACTCATGATTTATGATGTCAGTGAGCGGCCCTCAGG |
| | | | GGTTTCTAATCGCTTCTCTGGCTCCAAGTCTGGCAACACGGCCT |
| | | | CCCTGACAATCTCTGGGCTCCAGGCTGAGGACGAGGGTGATTAT |
| | | | TACTGCTGCTCATATGCAGCTAATAGCAATGTGCTATTCGGCGG |
| | | | AGGGACCAAACTGTCCGTCCTA |
| 982 | YANG-2108h | VL domain | QSALTQPASVSGSPGQSTTISCTGTSSDVGGYNYVSWYQQHPGK |
| | | amino | APKLMIYDVSERPSGVSNRFSGSKSGNTASLTISGLQAEDEGDY |
| | | acid | YCCSYAANSNVLFGGGTKLSVL |
| | | sequence | |
| 983 | YANG-2108h | LCDR1 | SSDVGGYNY |
| 203 | YANG-2108h | LCDR2 | DVS |
| 984 | YANG-2108h | LCDR3 | CSYAANSNVL |
| 985 | YANG-2108i | VH domain | CAGGTGCAACTGCAGGAGTCGGGCCCAGGACTGGTGAAGCCTTC |
| | | nucleic | GGGGACCCTGTCCCTCACCTGCGCTGTCTCTGGTGGCTCCATCA |
| | | acid | GAAGTAGTAACTGGTGGATTTGGGTCCGCCAGTCCCCAGGGAAG |
| | | sequence | GGGCTGGAGTGGATTGGGGAAATCTATCATGGTGGGAACACCAA |
| | | | CTACAACCCGTCCCTCAAGAGTCGAGTCACCACATTAGTAGACA |
| | | | AGTCCAAAAACCAATTCTCCCTGAAATTGAGTTCTGTGACCGCC |
| | | | GCGGACACGGCCGTATATTACTGTGCGAGAGCTCTTTACGATAT |
| | | | CGGGGGAGTTTTTGATATTTGGAGCCAAGGGACGATGGTCACCG |
| | | | TCTCTTCA |
| 986 | YANG-2108i | VH domain | QVQLQESGPGLVKPSGTLSLTCAVSGGSIRSSNWWIWVRQSPGK |
| | | amino | GLEWIGEIYHGGNTNYNPSLKSRVTTLVDKSKNQFSLKLSSVTA |
| | | acid | ADTAVYYCARALYDIGGVFDIWSQGTMVTVSS |
| | | sequence | |
| 987 | YANG-2108i | HCDR1 | GGSIRSSNW |
| 988 | YANG-21081 | HCDR2 | IYHGGNT |
| 989 | YANG-2108i | HCDR3 | ARALYDIGGVEDI |
| 990 | YANG-2108i | VL domain | CAGTCTGCCCTGACTCAGCCTGCCTCCGTGTCGGGGTCTCCTGG |
| | | nucleic | ACAGTCGATCACCATCTCCTGCACTGGAACCATCAGTGATGTTG |
| | | acid | GTGGTTATAACTATGTCTCTTGGTACCAACAGCACCCAGGCAAA |
| | | sequence | GCCCCCAAACTCATGATTTATGATGTCAGTGAGCGGCCCTCAGG |
| | | | GATTTCTAATCGCTTCTCTGGCTCCAAGTCTGGCAACACGGCCT |
| | | | CCCTGACAATCTCTGGGCTCCAGACTGAGGACGAGGGTGATTAT |
| | | | TACTGCTGCTCATATGCAGCTAATAGCAATGTGGTATTCGGCGG |
| | | | AGGGACCAAACTGTCCGTCCTA |
| 991 | YANG-2108i | VL domain | QSALTQPASVSGSPGQSITISCTGTISDVGGYNYVSWYQQHPGK |
| | | amino | APKLMIYDVSERPSGISNRFSGSKSGNTASLTISGLQTEDEGDY |
| | | acid | YCCSYAANSNVVFGGGTKLSVL |
| | | sequence | |
| 992 | YANG-2108i | LCDR1 | ISDVGGYNY |
| 203 | YANG-2108i | LCDR2 | DVS |
| 993 | YANG-21081 | LCDR3 | CSYAANSNVV |
| 994 | YANG-2108j | VH domain | CAGGTGCAGCTGCAGGAGTCGGGCCCAGGACAGGTGAAGCCTTC |
| | | nucleic | GGGGACCCTGTCCCTCACCTGCGCTGTCTCTGGTGGCTCCATCA |
| | | acid | GAAGTAGTAACTGGTGGATTTGGGTCCGCCAGTCCCCAGGGAAG |
| | | sequence | GGTCTGGAGTGGATTGGGGAAATCTATCATGGTGGAAACACCAA |
| | | | CTACAACCCGTCCCTCAAGAGTCGAGTCACCATATCATTAGACA |
| | | | AGTCCAAGAACCAGTTCTCCCTGAACCTGACCTCTGTGACCGCC |
| | | | GCGGACACGGCCGTATATTACTGTGCGAGAGCTCTTTACGATAT |
| | | | CGGGGGAGTTTTTGATATTTGGGGCCAAGGGACTATGGTCATCG |
| | | | TCTCTTCA |
| 995 | YANG-2108j | VH domain | QVQLQESGPGQVKPSGTLSLTCAVSGGSIRSSNWWIWVRQSPGK |
| | | amino | GLEWIGEIYHGGNTNYNPSLKSRVTISLDKSKNQFSLNLTSVTA |
| | | acid | ADTAVYYCARALYDIGGVFDIWGQGTMVIVSS |
| | | sequence | |
| 996 | YANG-2108j | HCDR1 | GGSIRSSNW |
| 997 | YANG-2108j | HCDR2 | IYHGGNT |
| 998 | YANG-2108j | HCDR3 | ARALYDIGGVFDI |
| 999 | YANG-2108j | VL domain | CAGTCTGCCCTGACTCAGCCTGCCTCCGTGTCGGGGTCTCCTGG |
| | | nucleic | ACAGTCGATCACCATCTCCTGCACTGGAAGCAGCAGTGATGTTG |
| | | acid | GTGGTTATAACTATGTCTCCTGGTACCAACAGCACCCAGGCAAA |
| | | sequence | GCCCCCAAACTCATGATTTATGATGTCAGTGAGCGGCCCTCAGG |
| | | | GGTTTCTAGTCGATTTTCTGGCTCCAAGTCTGGCAGCACGGCCT |
| | | | CCCTGACAATCTCTGGGCTCCAGGCTGAGGACGAGGGTGATTAT |
| | | | TACTGCTGCTCATATGCAATTAATAGCGATGTGGTTTTCGGCGG |
| | | | AGGGACCAAACTGTCCGTCCTA |
| 1000 | YANG-2108j | VL domain | QSALTQPASVSGSPGQSITISCTGSSSDVGGYNYVSWYQQHPGK |
| | | amino | APKLMIYDVSERPSGVSSRFSGSKSGSTASLTISGLQAEDEGDY |
| | | acid | YCCSYAINSDVVFGGGTKLSVL |
| | | sequence | |
| 1001 | YANG-2108j | LCDR1 | SSDVGGYNY |
| 1002 | YANG-2108j | LCDR2 | DVS |
| 1003 | YANG-2108j | LCDR3 | CSYAINSDVV |
| 1004 | YANG-2108k | VH domain | CAGGTGCAGCTGCAGGAGTCGGGCCCAGGACAGGTGAAGCCTTC |
| | | nucleic | GGGGACCCTGTCCCTCACCTGCGCTGTCTCTGGTGGCTCCATCA |
| | | acid | GAAGTAGTAACTGGTGGATTTGGGTCCGCCAGTCCCCCGGGAAG |
| | | sequence | GGTCTGGAGTGGATTGGGGAAATCTATCATGGTGGGAAGACCAA |
| | | | CTACAACCCGTCCCTCAAGAGTCGACTCACCATATCAGTAGACA |
| | | | AGTCCAAGAACCAGTTCTCCATGAAGCTGAGCTCTGTGACCGCC |
| | | | GCGGACACGGCCGTATATCACTGTGCGAGAACTCTTTATGATAT |
| | | | CGGGGGAGTTTTTGATATTTGGGGCCAAGGGACTATGGTCACCG |
| | | | TCTCTTCA |
| 1005 | YANG-2108k | VH domain | QVQLQESGPGQVKPSGTLSLTCAVSGGSIRSSNWWIWVRQSPGK |
| | | amino | GLEWIGEIYHGGKTNYNPSLKSRLTISVDKSKNQFSMKLSSVTA |
| | | acid | ADTAVYHCARTLYDIGGVFDIWGQGTMVTVSS |
| | | sequence | |
| 1006 | YANG-2108k | HCDR1 | GGSIRSSNW |
| 1007 | YANG-2108k | HCDR2 | IYHGGKT |
| 1008 | YANG-2108k | HCDR3 | ARTLYDIGGVFDI |
| 1009 | YANG-2108k | VL domain | CAGTCTGCCCTGACTCAGCCTGCCTCCGTGTCGGGGTCTCCTGG |
| | | nucleic | ACAGTCGATCACCATCTCCTGCACTGGAACCAGCAGTGATGTTG |
| | | acid | GTGGTTATAACTATGTCTCCTGGTACCAACACCACACAGGCAAA |
| | | sequence | GCCCCCAAACTCATGATTTATGATGTTAGTGAGCGGCCCTCAGG |
| | | | GGTTTCTAATCGCTTCTCTGGCTCCAAGTCTGGCAACACGGCCT |
| | | | CCCTGACAATCTCTGGGCTCCAGGCTGAGGACGAGGGTGATTAT |
| | | | TACTGCTGCTCATATGCAGCTGATAGCAATGTGGTTTTCGGCGG |
| | | | AGGGACCAAACTGTCCGTCCTA |
| 1010 | YANG-2108k | VL domain | QSALTQPASVSGSPGQSITISCTGTSSDVGGYNYVSWYQHHTGK |
| | | amino | APKLMIYDVSERPSGVSNRFSGSKSGNTASLTISGLQAEDEGDY |
| | | acid | YCCSYAADSNVVFGGGTKLSVL |
| | | sequence | |
| 1011 | YANG-2108k | LCDR1 | SSDVGGYNY |
| 1012 | YANG-2108k | LCDR2 | DVS |
| 1013 | YANG-2108k | LCDR3 | CSYAADSNVV |
| 1014 | YANG-21081 | VH domain | CAGGTGCAGCTGCAGGAGTCGGGCCCAGGACAGGTGAAGCCTTC |
| | | nucleic | GGGGACCCTGTCCCTCACCTGCGCTGTCTCTGGTGGCTCCATCA |
| | | acid | GAAGTAGTAACTGGTGGATTTGGGTCCGCCAGCCCCCAGGGAAG |
| | | sequence | GGTCTGGAGTGGATTGGGGAAATCTATCATGGTGGAAATACCAA |
| | | | CTACAAGCCGTCCCTCAAGAGTCGAGTCACCATATCAGTTGACA |
| | | | TGTCCAAGAACCAGTTCTCCCTGCAGTTGACTTCTGTGACCGCC |
| | | | GCGGACACGGCCGTATACTACTGTGCGAGAGCTCTTTATGATAT |
| | | | CGGGGGAGTCTTTGATATTTGGGGCCAAGGGACGATGGTCACCG |
| | | | TCTCTTCA |
| 1015 | YANG-21081 | VH domain | QVQLQESGPGQVKPSGTLSLTCAVSGGSIRSSNWWIWVRQPPGK |
| | | amino | GLEWIGEIYHGGNTNYKPSLKSRVTISVDMSKNQFSLQLTSVTA |
| | | acid | ADTAVYYCARALYDIGGVFDIWGQGTMVTVSS |
| | | sequence | |
| 1016 | YANG-21081 | HCDR1 | GGSIRSSNW |
| 1017 | YANG-21081 | HCDR2 | IYHGGNT |
| 1018 | YANG-21081 | HCDR3 | ARALYDIGGVFDI |
| 1019 | YANG-21081 | VL domain | CAGTCTGCCCTGACTCAGCCTGCCTCCGTGTCGGGGTCTCCTGG |
| | | nucleic | ACAGTCGATCACCATCTCCTGCACTGGAACCAGCAGTGATGTTG |
| | | acid | GTGGTTATAACTATGTCTCCTGGTACCAACAGTATCCAGGCAAA |
| | | sequence | GCCCCCAAACTCATGATTTATGATGTCAGTGAGCGGCCCTCAGG |
| | | | GGTTTCTAATCGCTTCTCTGGCTCCAAGTCTGGCAACACGGCCT |
| | | | CCCTGACAATCTCTGGGCTCCAGGCTGAGGACGAGGGTGATTAT |
| | | | TACTGCTGCTCATATGCAGCTAATAGCAATGTGGTATTCGGCGG |
| | | | AGGGACCAAACTGTCCGTCCTA |
| 1020 | YANG-21081 | VL domain | QSALTQPASVSGSPGQSITISCTGTSSDVGGYNYVSWYQQYPGK |
| | | amino | APKLMIYDVSERPSGVSNRFSGSKSGNTASLTISGLQAEDEGDY |
| | | acid | YCCSYAANSNVVFGGGTKLSVL |
| | | sequence | |
| 1021 | YANG-21081 | LCDR1 | SSDVGGYNY |
| 1022 | YANG-21081 | LCDR2 | DVS |
| 1023 | YANG-21081 | LCDR3 | CSYAANSNVV |
| 1024 | YANG-2109 | VH domain | CAGGTCCAGCTGGTGCAGTCTGGGGCTGAGGTGAAGAAGCCTGG |
| | | nucleic | GTCCTCGGTGAAGGTCTCCTGTAAGGCTTCTGGAGGCACCTTCA |
| | | acid | GCGGTTATACTATCAGCTGGATTCGACAGGCCCCTGGACAGGGA |
| | | sequence | CTTGAGTGGATGGGAGGGATCATCCCTAGCTTTGGCTCATTAAA |
| | | | CTATGGACAGAAGTTCCAGGACAGAGTCTCGATTACCACGGACG |
| | | | AATTAAAGAGCACTGTGTACATGGAGCTGAGCAGCCTGAATTCT |
| | | | GAGGACACGGCCATATATTATTGTACGAGAGAATCAATAACTTC |
| | | | GGGCTACTATTACGGTATGGCCGTCTGGGGCCAAGGGACCACGG |
| | | | TCACCGTCTCCTCA |
| 1025 | YANG-2109 | VH domain | QVQLVQSGAEVKKPGSSVKVSCKASGGTFSGYTISWIRQAPGQG |
| | | amino | LEWMGGIIPSFGSLNYGQKFQDRVSITTDELKSTVYMELSSLNS |
| | | acid | EDTAIYYCTRESITSGYYYGMAVWGQGTTVTVSS |
| | | sequence | |
| 1026 | YANG-2109 | HCDR1 | GGTFSGYT |
| 1027 | YANG-2109 | HCDR2 | IIPSFGSL |
| 1028 | YANG-2109 | HCDR3 | TRESITSGYYYGMAV |
| 1029 | YANG-2109 | VL domain | GACATCCAGATGACCCAGTCTCCATCCTCCCTGTCTGCATCTGT |
| | | nucleic | AGGAGACAGAGTCACCATCACTTGCCGGGCAAGTCAGGGCATTA |
| | | acid | GAGATGATTTAGGCTGGTTTCAGCAGAAACCAGGGAAAGCCCCT |
| | | sequence | AAGCGCCTGATCTCTGCTGCATCCAGTTTGCAAAGTGGAGTCCC |
| | | | ATCAAGGTTCAGCGGCAGTGGATCTGGGACAGAATTCACTCTCA |
| | | | CAATCAGCAGCCTGCAGCCTGAAGATTTTGCAACTTATTACTGT |
| | | | CTACAGCATAATAGTTACCCGCTCACTTTCGGCGGAGGGACCAA |
| | | | GGTGGAGATCAGA |
| 1030 | YANG-2109 | VL domain | DIQMTQSPSSLSASVGDRVTITCRASQGIRDDLGWFQQKPGKAP |
| | | amino | KRLISAASSLQSGVPSRFSGSGSGTEFTLTISSLQPEDFATYYC |
| | | acid | LQHNSYPLTFGGGTKVEIR |
| | | sequence | |
| 1031 | YANG-2109 | LCDR1 | QGIRDD |
| 1032 | YANG-2109 | LCDR2 | AAS |
| 1033 | YANG-2109 | LCDR3 | LQHNSYPLT |
| 1034 | YANG-2110 | VH domain | GAGGTGCAGCTGGTGGAGTCTGGAGGAGGCTTGATCCAGCCTGG |
| | | nucleic | GGGGTCCCTGAGACTCTCCTGTGCAGCCTCTGGGTTCATCGTCA |
| | | acid | GTCGCAATTATATGAGTTGGGTCCGCCAGGCTCCAGGGAAGGGG |
| | | sequence | CTGGACTGGGTCTCAGTTATTTATAGCGGTGGCAGCACATACTA |
| | | | CGCAGACTCCGTGAAGGGCCGATTTACCATCTCCAGAGACAATT |
| | | | CCAAGAACACGCTGTATCTTCAAATGAACAGCCTGAGAGCCGAG |
| | | | GACACGGCCGTCTATTACTGTGCGAGGTCTATAGCAGTGGCTGG |
| | | | TGAGGGGCTTGACTCCTGGGGCCAGGGAACCCTGGTCACCGTCT |
| | | | CCTCA |
| 1035 | YANG-2110 | VH domain | EVQLVESGGGLIQPGGSLRLSCAASGFIVSRNYMSWVRQAPGKG |
| | | amino | LDWVSVIYSGGSTYYADSVKGRFTISRDNSKNTLYLQMNSLRAE |
| | | acid | DTAVYYCARSIAVAGEGLDSWGQGTLVTVSS |
| | | sequence | |
| 1036 | YANG-2110 | HCDR1 | GFIVSRNY |
| 1037 | YANG-2110 | HCDR2 | IYSGGST |
| 1038 | YANG-2110 | HCDR3 | ARSIAVAGEGLDS |
| 1039 | YANG-2110 | VL domain | GAAATTGTAATGACACAGTCTCCAGCCACCCTGTCTTTGTCTCC |
| | | nucleic | AGGGGACAGAGCCACCCTCTCCTGCAGGGCCAGTCAGAGTGTTA |
| | | acid | GCAACATCTTCATATCCTGGTACCAGCAGAAACCTGGGCAGGCT |
| | | sequence | CCCAGGCTCCTCATTTATGGTGCATCCATCAGGGCCACTGACAT |
| | | | CCCAGCCAGGTTCAGTGGCAGTGGGTCTGGGACAGACTTCACTC |
| | | | TCACCATCAGCAGCCTGCAGCCTGAAGATTTTGCAATTTATTTC |
| | | | TGTCAGCAGGATTATAACTTACCGCTCACTTTCGGCGGAGGGAC |
| | | | CAAGGTGGAGATCAAA |
| 1040 | YANG-2110 | VL domain | EIVMTQSPATLSLSPGDRATLSCRASQSVSNIFISWYQQKPGQA |
| | | amino | PRLLIYGASIRATDIPARFSGSGSGTDFTLTISSLQPEDFAIYF |
| | | acid | CQQDYNLPLTFGGGTKVEIK |
| | | sequence | |
| 1041 | YANG-2110 | LCDR1 | QSVSNIF |
| 1042 | YANG-2110 | LCDR2 | GAS |
| 1043 | YANG-2110 | LCDR3 | QQDYNLPLT |
| 1044 | YANG-2111 | VH domain | GGAGTCCAACTGGTGGAGTCTGGGGGAGGCTTGGTACAGCCTGG |
| | | nucleic | CAGGTCCCTGAGACTCTCCTGTGCAGCCTCTGGATTCACCTTTG |
| | | acid | ATGATTATGCCTTACACTGGGTCCGGCAAGTTCCAGGGAAGGGC |
| | | sequence | CTGGAGTGGGTCTCAAGCATTAGTTGGAATAGTGATGACCTAGG |
| | | | CTATGCGGACTCTGTGGAGGGCCGATTCACCATCTCCAGAGACA |
| | | | ACGCCAAGAACTCCCTGTATCTGCAAATGAGCAGTCTGAGAACT |
| | | | GAGGACACGGCCTTGTATTACTGTGTAAAGGATACTAGGGCGCA |
| | | | TTACGATATTTTGGCTGGTTATAGAGGGCTTGACTCTTGGGGCC |
| | | | AGGGAACCCTGGTCACCGTCTCTTCA |
| 1045 | YANG-2111 | VH domain | GVQLVESGGGLVQPGRSLRLSCAASGFTEDDYALHWVRQVPGKG |
| | | amino | LEWVSSISWNSDDLGYADSVEGRETISRDNAKNSLYLQMSSLRT |
| | | acid | EDTALYYCVKDTRAHYDILAGYRGLDSWGQGTLVTVSS |
| | | sequence | |
| 1046 | YANG-2111 | HCDR1 | GFTEDDYA |
| 1047 | YANG-2111 | HCDR2 | ISWNSDDL |
| 1048 | YANG-2111 | HCDR3 | VKDTRAHYDILAGYRGLDS |
| 1049 | YANG-2111 | VL domain | GATATTGTGATGACTCAGTCTCCACTCTCCCTGCCCGTCACCCC |
| | | nucleic | TGGAGAGCCGGCCTCCATCTCCTGCAGGTCTACTCAGAGCCTCC |
| | | acid | TACATAGTAATGGATACAACTTTTTGGATTGGTACCTGCAGAAG |
| | | sequence | CCAGGGCAGTCTCCACAACTCCTGATCTATTTGGGTTCTAATCG |
| | | | GGCCTCCGGGGTCCCTGACAGGTTCAGTGGCAGTGGATCAGGCA |
| | | | CAGATTTTTCACTGAAAATCAGCAGAGTGGAGGCTGAGGATATT |
| | | | GGAATTTATTACTGCATACAAGGTCTGCAAACTCCTATCACCTT |
| | | | CGGCCAAGGGACACGACTGGAGATTAAA |
| 1050 | YANG-2111 | VL domain | DIVMTQSPLSLPVTPGEPASISCRSTQSLLHSNGYNFLDWYLQK |
| | | amino | PGQSPQLLIYLGSNRASGVPDRESGSGSGTDESLKISRVEAEDI |
| | | acid | GIYYCIQGLQTPITFGQGTRLEIK |
| | | sequence | |
| 1051 | YANG-2111 | LCDR1 | QSLLHSNGYNE |
| 1052 | YANG-2111 | LCDR2 | LGS |
| 1053 | YANG-2111 | LCDR3 | IQGLQTPIT |
| 1054 | YANG-2111a | VH domain | GAAGTGGAGCTGGTGGAGTCTGGGGGAGGCTTGGTACAGCCTGG |
| | | nucleic | CAGGTCCCTGAGACTCTCCTGTGCTGCCTCTGGCTTCATCTTTG |
| | | acid | ATGATTATGCCTTACACTGGGTCCGGCAAATTCCAGGGAAGGGC |
| | | sequence | CTGGAGTGGGTCTCAAGTATTAGTTGGAATAGTGATGACGTAGG |
| | | | CTATGCGGACTCTGTGGAGGGCCGATTCACCATCTCCAGAGACA |
| | | | ACGCCAAGAACTCCCTGTATCTGCAAATGAGCAGTCTGAGAGCT |
| | | | GAGGACACGGCCTTATATTACTGTGTAAAGGATGTTAGGGCTCA |
| | | | TTACGATATTTTGGCTGCTTATAGAGGACTTGACTATTGGGGCC |
| | | | AGGGAACCCTGGTCACCGTCTCCTCA |
| 1055 | YANG-2111a | VH domain | EVELVESGGGLVQPGRSLRLSCAASGFIFDDYALHWVRQIPGKG |
| | | amino | LEWVSSISWNSDDVGYADSVEGRETISRDNAKNSLYLQMSSLRA |
| | | acid | EDTALYYCVKDVRAHYDILAAYRGLDYWGQGTLVTVSS |
| | | sequence | |
| 1056 | YANG-2111a | HCDR1 | GFIFDDYA |
| 1057 | YANG-2111a | HCDR2 | ISWNSDDV |
| 1058 | YANG-2111a | HCDR3 | VKDVRAHYDILAAYRGLDY |
| 1059 | YANG-2111a | VL domain | GATGTTGTGATGACTCAGTCTCCGCTCTCCCTGCCCGTCACCCC |
| | | nucleic | TGGAGAGCCGGCCTCCATCTCCTGCAGGTCTAGTCAGAGCCTCC |
| | | acid | TGCATAGCAATGGATACAACTATTTGGATTGGTACCTGCAGAAG |
| | | sequence | CCAGGGCAGTCTCCACAACTCCTGATCTATTTGGGTTCTAATCG |
| | | | GGCCTCCGGGGTCCCTGACAGGTTCAGTGGCAGTGGATCAGGCA |
| | | | CAGATTTTACACTGAAGATCAGTAGAATGGAGGCTGAGGATGTT |
| | | | GGGGTTTATTACTGCATGCAAGGTCTACAAACTCCTATCACCTT |
| | | | CGGCCAAGGGACACGACTGGAGATTAAG |
| 1060 | YANG-2111a | VL domain | DVVMTQSPLSLPVTPGEPASISCRSSQSLLHSNGYNYLDWYLQK |
| | | amino | PGQSPQLLIYLGSNRASGVPDRFSGSGSGTDFTLKISRMEAEDV |
| | | acid | GVYYCMQGLQTPITFGQGTRLEIK |
| | | sequence | |
| 1061 | YANG-2111a | LCDR1 | QSLLHSNGYNY |
| 1062 | YANG-2111a | LCDR2 | LGS |
| 1063 | YANG-2111a | LCDR3 | MQGLQTPIT |
| 1064 | YANG-2111b | VH domain | GAAGTGCAACTGGTGGAGTCTGGGGGAGGCTTGGTACAGCCTGG |
| | | nucleic | CAGGTCCCTGAGACTCTCCTGTGCAGCCTCTGGCTTCATCTTTG |
| | | acid | ATGATTATGCCTTACACTGGGTCCGGCAAGTTCCAGGGAAGGGC |
| | | sequence | CTGGAGTGGGTCTCAAGTATTAGTTGGAATAGTGATGACATAGG |
| | | | CTATGCGGACTCTGTGGAGGGCCGATTCACCATCTCCAGAGACA |
| | | | ACGCCAAGAACTCCCTGTATCTGCAAATGAGTAGTCTGAGAGCT |
| | | | GAGGACACGGCCTTATATTACTGTGTAAAGGATGTTAGGGCGCA |
| | | | TTACGATATTTTGGCTGCTTATAGAGGACTTGACTATTGGGGCC |
| | | | AGGGAACCCTGGTCACCGTCTCCTCA |
| 1065 | YANG-2111b | VH domain | EVQLVESGGGLVQPGRSLRLSCAASGFIFDDYALHWVRQVPGKG |
| | | amino | LEWVSSISWNSDDIGYADSVEGRFTISRDNAKNSLYLQMSSLRA |
| | | acid | EDTALYYCVKDVRAHYDILAAYRGLDYWGQGTLVTVSS |
| | | sequence | |
| 1066 | YANG-2111b | HCDR1 | GFIFDDYA |
| 1067 | YANG-2111b | HCDR2 | ISWNSDDI |
| 1068 | YANG-2111b | HCDR3 | VKDVRAHYDILAAYRGLDY |
| 1069 | YANG-2111b | VL domain | GATATTGTGATGACTCAGTCTCCACTCTCCCTGCCCGTCACCCC |
| | | nucleic | TGGAGAGCCGGCCTCCATCTCCTGCAGGTCTAGTCAGAGCCTCC |
| | | acid | TGCATAGCAATGGATACAACTATTTGGATTGGTACCTGCAGAAG |
| | | sequence | CCAGGGCAGTCTCCACAACTCCTGATCTATTTGGGTTCTAATCG |
| | | | GGCCTCCGGGGTCCCTGACAGGTTCAGTGTCAGTGGATCAGGCA |
| | | | CAGATTTTACACTGAAAATCAGCAGAGTGGCGGCTGAGGATGTT |
| | | | GGGGTTTATTACTGCATGCAAGGTCTACAAACTCCTATCACCTT |
| | | | CGGCCAAGGGACACGACTGGAGATTACA |
| 1070 | YANG-2111b | VL domain | DIVMTQSPLSLPVTPGEPASISCRSSQSLLHSNGYNYLDWYLQK |
| | | amino | PGQSPQLLIYLGSNRASGVPDRFSVSGSGTDFTLKISRVAAEDV |
| | | acid | GVYYCMQGLQTPITFGQGTRLEIT |
| | | sequence | |
| 1071 | YANG-2111b | LCDR1 | QSLLHSNGYNY |
| 1072 | YANG-2111b | LCDR2 | LGS |
| 1073 | YANG-2111b | LCDR3 | MQGLQTPIT |
| 1074 | YANG-2112 | VH domain | CAGGTCCAACTGGTACAGTCTGGGGCTGAAGTGAAGAAGCCTGG |
| | | nucleic | GGCCTCAGTGAAGGTCTCCTGCAAGGTTTCCGGGTTCACCCTCA |
| | | acid | CTCACTTATCCATTCACTGGGTGCGACAGGCTCCTGGAAGAGGA |
| | | sequence | CTTGAGTGGATGGGAGGTTTTGATCCTGTGGATGGTCAAACAGT |
| | | | CTACGCACAGAACTTCCAGGGCAGAGTCACCATGACCGAGGACA |
| | | | CATCTACAGACACAGCCAACATGGACCTGAACAACCTGAAATCT |
| | | | GAGGACACGGCCGTTTATTACTGTGCGACGGGTGTAGTAGTACC |
| | | | AGCTGCCCCTTACTACTACTCCTCCGGAATGGACGTCTGGGGCC |
| | | | AAGGGACCACGGTCACCGTCTCCTCA |
| 1075 | YANG-2112 | VH domain | QVQLVQSGAEVKKPGASVKVSCKVSGFTLTHLSIHWVRQAPGRG |
| | | amino | LEWMGGFDPVDGQTVYAQNFQGRVTMTEDTSTDTANMDLNNLKS |
| | | acid | EDTAVYYCATGVVVPAAPYYYSSGMDVWGQGTTVTVSS |
| | | sequence | |
| 1076 | YANG-2112 | HCDR1 | GFTLTHLS |
| 1077 | YANG-2112 | HCDR2 | FDPVDGQT |
| 1078 | YANG-2112 | HCDR3 | ATGVVVPAAPYYYSSGMDV |
| 1079 | YANG-2112 | VL domain | CAGTCTGTGCTGACTCAGCCACCCTCAACGTCTGGGACCCCCGG |
| | | nucleic | GCAGAGGGTCACCATCTCTTGCTCTGGAAGCAGCTCCAACATCG |
| | | acid | CAAAAAATTATGTATACTGGTACCAACAACTCCCAGGAACGGCC |
| | | sequence | CCCAAACTCCTCATCTATAGGACTAATCAGCGGCCCTCTGGGGT |
| | | | CCCTGACCGATTCTCTGGCTCCAGGTCTGGCACCTCAGCCTCCC |
| | | | TGGCCATCAGTGGGCTCCGGTCCGAGGATGAGGCTACTTATTAC |
| | | | TGTGCAACATGGGATGACACCCTGAGTGTGATATTCGGCGGAGG |
| | | | GACCAACCTGACCGTCCTG |
| 1080 | YANG-2112 | VL domain | QSVLTQPPSTSGTPGQRVTISCSGSSSNIAKNYVYWYQQLPGTA |
| | | amino | PKLLIYRTNQRPSGVPDRESGSRSGTSASLAISGLRSEDEATYY |
| | | acid | CATWDDTLSVIFGGGTNLTVL |
| | | sequence | |
| 1081 | YANG-2112 | LCDR1 | SSNIAKNY |
| 1082 | YANG-2112 | LCDR2 | RTN |
| 1083 | YANG-2112 | LCDR3 | ATWDDTLSVI |
| 1084 | YANG-2201 | VH domain | CAGGAGCAGCTGGTGGAGTCTGGGGGAGGCGTGGTCCAGCCTGG |
| | | nucleic | GATGTCCCTGAGACTCTCCTGTGCAGCCTCTGGATTCACCTTCA |
| | | acid | GTAACTATGGCATGCACTGGGTCCGCCAGTCTCCCGGCAAGGGG |
| | | sequence | CTGGAATGGGTGACTTTTATATCATATGATGGAAATAATGAATA |
| | | | CTATGTAGACTCCGTGAAGGGCCGATTCACCATCTCCAGAGACA |
| | | | ATTCCAAGAACACGCTGTTTCTGCAAATGAACAGCCTGAGAGCT |
| | | | GAGGACGCGGCTGTGTATTACTGTGCGAAAGATCGTGCATTGAA |
| | | | CCTTTACTACTTTGATTCCTGGGGCCCGGGAACCCTGGTCACCG |
| | | | TCTCCTCA |
| 1085 | YANG-2201 | VH domain | QEQLVESGGGVVQPGMSLRLSCAASGFTFSNYGMHWVRQSPGKG |
| | | amino | LEWVTFISYDGNNEYYVDSVKGRFTISRDNSKNTLFLQMNSLRA |
| | | acid | EDAAVYYCAKDRALNLYYFDSWGPGTLVTVSS |
| | | sequence | |
| 1086 | YANG-2201 | HCDR1 | GFTFSNYG |
| 1087 | YANG-2201 | HCDR2 | ISYDGNNE |
| 1088 | YANG-2201 | HCDR3 | AKDRALNLYYFDS |
| 1089 | YANG-2201 | VL domain | GATATTGTGATGACTCAGCCTCCACTCTCCCTGCCCGTCACTCC |
| | | nucleic | TGGAGAGCCGGCCTCCATCTCCTGCAGGTCTAGTCAGAGCCTCC |
| | | acid | TGCATAATAATGCCTACAACCATTIGAATTGGTATCTGCAGAAG |
| | | sequence | CCAGGGCAGTCTCCACAGTTCCTGATCTATTTGGGTTCTAATCG |
| | | | GGCCTCCGGGGTCCCTGACAGGTTCAGTGGCAGTGGATCAGGCA |
| | | | CAGATTTTACACTGAAAATCAGCAGAGTGGAGGCTGAGGATGTT |
| | | | GGGGTTTATTACTGCATGCAATCTCTACAAATTCCGATCACCTT |
| | | | CGGCCAAGGGACACGACTGGAAATTAAA |
| 1090 | YANG-2201 | VL domain | DIVMTQPPLSLPVTPGEPASISCRSSQSLLHNNAYNHLNWYLQK |
| | | amino | PGQSPQFLIYLGSNRASGVPDRFSGSGSGTDFTLKISRVEAEDV |
| | | acid | GVYYCMQSLQIPITFGQGTRLEIK |
| | | sequence | |
| 1091 | YANG-2201 | LCDR1 | QSLLHNNAYNH |
| 1092 | YANG-2201 | LCDR2 | LGS |
| 1093 | YANG-2201 | LCDR3 | MQSLQIPIT |
| 1094 | YANG-2202 | VH domain | GAGGTGCAATTGGTGGAGTCTGGGGGAGGCTTGGTTCAGCCGGG |
| | | nucleic | GGGGTCCCTGAGACTCTCCTGTGCAGCCTCTGGATTCACCTTTA |
| | | acid | GCAGTTTTGCCATGAGTTGGGTCCGCCAGGCTCCAGGGAAGGGA |
| | | sequence | CTTGAGTGGGTCGCAGCCTTCAGTGGTCGTGGTGCGATTACACA |
| | | | CTACACAGACTCCGTGAAGGGCCGGTTCACCATCTCCAGAGACA |
| | | | ATTCCAAGAACACGCTGTATCTGCAAATGAACAGCCTGAGAGCC |
| | | | GAGGACACGGCCGTATATTACTGTGCGACTTATAATTGGAACCC |
| | | | CTACTACTTTGACTTCTGGGGCCAGGGAACCCTGGTCACCGTCT |
| | | | CCTCA |
| 1095 | YANG-2202 | VH domain | EVQLVESGGGLVQPGGSLRLSCAASGFTFSSFAMSWVRQAPGKG |
| | | amino | LEWVAAFSGRGAITHYTDSVKGRFTISRDNSKNTLYLQMNSLRA |
| | | acid | EDTAVYYCATYNWNPYYFDFWGQGTLVTVSS |
| | | sequence | |
| 1096 | YANG-2202 | HCDR1 | GFTFSSFA |
| 1097 | YANG-2202 | HCDR2 | FSGRGAIT |
| 1098 | YANG-2202 | HCDR3 | ATYNWNPYYFDF |
| 1099 | YANG-2202 | VL domain | GACATCCAGATGACCCAGTCTCCATCTTCCGTGTCTGCATCTAT |
| | | nucleic | AGGAGACAGAGTCACCATCACCTGTCGGGCGAGTCAGGATATTA |
| | | acid | ATATCTGGTTGGCCTGGTATCAGCAGAAACCAGGGAAAGCCCCT |
| | | sequence | AATCTCCTGATCTTTGATACATCCAATTTACAGAGTGGGGTCCC |
| | | | ATCAAGGTTCAGTGGCAGTGGATCTGGGTCAGATTTCACTCTCA |
| | | | CCATCAGCAGCCTGCAGCCTGAAGATTTTGCAACTTACTATTGT |
| | | | CAACAGGGTAACAGTTTCCCTCGGACCTTCGGCCAGGGGACACG |
| | | | ACTGGAAATTAAA |
| 1100 | YANG-2202 | VL domain | DIQMTQSPSSVSASIGDRVTITCRASQDINIWLAWYQQKPGKAP |
| | | amino | NLLIFDTSNLQSGVPSRFSGSGSGSDFTLTISSLQPEDFATYYC |
| | | acid | QQGNSFPRTFGQGTRLEIK |
| | | sequence | |
| 1101 | YANG-2202 | LCDR1 | QDINIW |
| 1102 | YANG-2202 | LCDR2 | DTS |
| 1103 | YANG-2202 | LCDR3 | QQGNSFPRT |
| 1104 | YANG-2203 | VH domain | CAGGTGCAACTGGTGCAGTCTGGGGCTGAGGTGAAGCAGCCTGG |
| | | nucleic | GGCCTCAGTGAAGGTTTCCTGCAGGGCATCTGGATACGCCCTCA |
| | | acid | CCAGCTTCTATGTTCACTGGGTGCGACAGGCCCCTGGACAAGGG |
| | | sequence | CTTGAGTGGATGGGCATAATCAAACCCAGTGGTGGTGACACAAT |
| | | | CTACGCTCAGAATCTCCAGGGCAGAGTCACCATGACCAGGGACA |
| | | | CGTCCACGAACACATTCTACGTGGAACTGAGCAGCCTGAGATCT |
| | | | GAGGACACGGCCCTATATTACTGTGCGATCAGTGGGAACACTAG |
| | | | GGCTTTTGAAATCTGGGGCCAAGGGACAATGGTCACCGTCTCTT |
| | | | TA |
| 1105 | YANG-2203 | VH domain | QVQLVQSGAEVKQPGASVKVSCRASGYALTSFYVHWVRQAPGQG |
| | | amino | LEWMGIIKPSGGDTIYAQNLQGRVTMTRDTSTNTFYVELSSLRS |
| | | acid | EDTALYYCAISGNTRAFEIWGQGTMVTVSL |
| | | sequence | |
| 1106 | YANG-2203 | HCDR1 | GYALTSFY |
| 1107 | YANG-2203 | HCDR2 | IKPSGGDT |
| 1108 | YANG-2203 | HCDR3 | AISGNTRAFEI |
| 1109 | YANG-2203 | VL domain | CAGTCTGTGTTGACGCAGCCGCCCTCAGTGTCTGCGGCCCCAGG |
| | | nucleic | ACAGAAGGTCACCATCTCCTGCTCTGGAAGCAGCTCCAACATTG |
| | | acid | GGAATAATTTTGTATCCTGGTACCAGCAGCTCCCAGGAATGGTC |
| | | sequence | CCCAAACTCCTCATTTATGCCAATAATAAGCGACCCTCAGGGAT |
| | | | TCCTGACCGATTCTCTGGCTCCAGGTCTGGCACGTCAGCCACCC |
| | | | TGGGCATCACCGGACTCCAGACTGGGGACGAGGCCGATTATTAC |
| | | | TGCGGAACTTGGGATAGTAGTCGGAGTGCTGTGCTTTTCGGCGG |
| | | | AGGGACCAAGATGACCGTCCTA |
| 1110 | YANG-2203 | VL domain | QSVLTQPPSVSAAPGQKVTISCSGSSSNIGNNFVSWYQQLPGMV |
| | | amino | PKLLIYANNKRPSGIPDRESGSRSGTSATLGITGLQTGDEADYY |
| | | acid | CGTWDSSRSAVLFGGGTKMTVL |
| | | sequence | |
| 1111 | YANG-2203 | LCDR1 | SSNIGNNE |
| 1112 | YANG-2203 | LCDR2 | ANN |
| 1113 | YANG-2203 | LCDR3 | GTWDSSRSAVL |
| 1114 | YANG-2203a | VH domain | CAGGTGCAACTGGTGCAGTCTGGGGCTGAGGTGAAGCAGCCTGG |
| | | nucleic | GGCCTCAGTGAAGGTTTCCTGCAGGGCATCTGGATACGCCCTCA |
| | | acid | CCAGCTTCTATGTTCACTGGGTGCGACAGGCCCCTGGACAAGGA |
| | | sequence | CTTGAGTGGATGGGCATAATCAAACCCAGTGGTGGTGACACAAT |
| | | | CTACGCTCAGAATCTCCAGGGCAGAGTCACCATGACCAGGGACA |
| | | | CGTCCACGAACACATTCTACGTGGAACTGAGCAGCCTGAGATCT |
| | | | GAGGACACGGCCCTATATTACTGTGCGATCAATGGGGACACTAG |
| | | | GGCTTTTGAAATCTGGGGCCAAGGGACAATGGTCACCGTCTCTT |
| | | | TA |
| 1115 | YANG-2203a | VH domain | QVQLVQSGAEVKQPGASVKVSCRASGYALTSFYVHWVRQAPGQG |
| | | amino | LEWMGIIKPSGGDTIYAQNLQGRVTMTRDTSINTFYVELSSLRS |
| | | acid | EDTALYYCAINGDTRAFEIWGQGTMVTVSL |
| | | sequence | |
| 1116 | YANG-2203a | HCDR1 | GYALTSFY |
| 1117 | YANG-2203a | HCDR2 | IKPSGGDT |
| 1118 | YANG-2203a | HCDR3 | AINGDTRAFEI |
| 1119 | YANG-2203a | VL domain | CAGTCTGTGTTGACGCAGCCGCCCTCAGTGTCTGCGGCCCCAGG |
| | | nucleic | ACAGAAGGTCACCATCTCCTGCTCTGGAAGCAGCTCCAACATTG |
| | | acid | GGAATAATTTTGTATCCTGGTACCAGCAGCTCCCAGGAATGGTC |
| | | sequence | CCCAAACTCCTCATTTATGCCAATAATAAGCGACCCTCAGGGAT |
| | | | TCCTGACCGATTCTCTGGCTCCAGGTCTGGCACGTCAGCCACCC |
| | | | TGGGCATCACCGGACTCCAGACTGGGGACGAGGCCGATTATTAC |
| | | | TGCGGAACTTGGGATAGTAGTCGGAGTGCTGTGCTTTTCGGCGG |
| | | | AGGGACCAAGATGACCGTCCTA |
| 1120 | YANG-2203a | VL domain | QSVLTQPPSVSAAPGQKVTISCSGSSSNIGNNFVSWYQQLPGMV |
| | | amino | PKLLIYANNKRPSGIPDRFSGSRSGTSATLGITGLQTGDEADYY |
| | | acid | CGTWDSSRSAVLFGGGTKMTVL |
| | | sequence | |
| 1121 | YANG-2203a | LCDR1 | SSNIGNNF |
| 1122 | YANG-2203a | LCDR2 | ANN |
| 1123 | YANG-2203a | LCDR3 | GTWDSSRSAVL |
| 1124 | YANG-2203b | VH domain | CAGGTGCAACTGGTGCAGTCTGGGGCTGAGGTGAAGCAGCCTGG |
| | | nucleic | GGCCTCAGTGAAGGTTTCCTGCAGGGCATCTGGATACGCCCTCA |
| | | acid | CCAACTTCTATGTTCACTGGGTGCGACAGGCCCCTGGACAAAAA |
| | | sequence | CTTGAGTGGATGGGCATAATCAAACCCAGTGGTGGTGACACAAT |
| | | | CTACGCTCAGAATCTCCAGGGCAGAGTCACCATGACCAGGGACA |
| | | | CGTCCACGAATACATTCTACGTGGAACTGAGCAGCCTGAGATCT |
| | | | GAGGACACGGCCCTATATTACTGTGCGATCAGTGGGAACACTAG |
| | | | GGCTTTTGAAATCTGGGGCCAAGGGACAATGGTCACCGTCTCTT |
| | | | TA |
| 1125 | YANG-2203b | VH domain | QVQLVQSGAEVKQPGASVKVSCRASGYALTNFYVHWVRQAPGQK |
| | | amino | LEWMGIIKPSGGDTIYAQNLQGRVTMTRDTSTNTFYVELSSLRS |
| | | acid | EDTALYYCAISGNTRAFEIWGQGTMVTVSL |
| | | sequence | |
| 1126 | YANG-2203b | HCDR1 | GYALTNFY |
| 1127 | YANG-2203b | HCDR2 | IKPSGGDT |
| 1128 | YANG-2203b | HCDR3 | AISGNTRAFEI |
| 1129 | YANG-2203b | VL domain | CAGTCTGTGTTGACGCAGCCGCCCTCAGTGTCTGCGGCCCCAGG |
| | | nucleic | ACAGAAGGTCACCATCTCCTGCTCTGGAAGCAGCTCCAACATTG |
| | | acid | GGAATAATTTTATATCCTGGTACCAGCAGCTCCCAGGAATGGTC |
| | | sequence | CCCAAACTCCTCATTTATGCCAATAATAAGCGACCCTCAGGGAT |
| | | | TCCTGACCGATTCTCTGGCTCCAGGTCTGGCACGTCAGCCACCC |
| | | | TGGGCATCACCGGACTCCAGACTGGGGACGAGGCCGATTATTTC |
| | | | TGCGGAACTTGGGATAGTAGTCGGAGTGCTGTGCTTTTCGGCGG |
| | | | AGGGACCAAGATGACCGTCCTA |
| 1130 | YANG-2203b | VL domain | QSVLTQPPSVSAAPGQKVTISCSGSSSNIGNNFISWYQQLPGMV |
| | | amino | PKLLIYANNKRPSGIPDRFSGSRSGTSATLGITGLQTGDEADYF |
| | | acid | CGTWDSSRSAVLFGGGTKMTVL |
| | | sequence | |
| 1131 | YANG-2203b | LCDR1 | SSNIGNNF |
| 1132 | YANG-2203b | LCDR2 | ANN |
| 1133 | YANG-2203b | LCDR3 | GTWDSSRSAVL |
| 1134 | YANG-2203c | VH domain | CAGGTGCAACTGGTGCAGTCTGGGGCTGAGGTGAAGCAGCCTGT |
| | | nucleic | GGCCTCAGTGAAGGTTTCCTGTCGGGCATCTGGTTACGCCCTCA |
| | | acid | CCAGCTTCTATGTTCACTGGGTGCGACAGGCCCCTGGACAAGGG |
| | | sequence | CTTGAGTGGATGGGCATAATCAAACCCAGTGGTGGTGACACAAT |
| | | | CTACGCTCAGAATCTCCAGGGCAGAGTCACCATGACCAGGGACA |
| | | | CGTCCACGAACACATTCTACGTGGAACTGAGCAGCCTGAGATCT |
| | | | GAGGACACGGCCCTATATTACTGTGCGATCAGTGGGAACACTAG |
| | | | GGCTTTTGAAATCTGGGGCCAAGGGACAATGGTCACCGTCTCTT |
| | | | TA |
| 1135 | YANG-2203c | VH domain | QVQLVQSGAEVKQPVASVKVSCRASGYALTSFYVHWVRQAPGQG |
| | | amino | LEWMGIIKPSGGDTIYAQNLQGRVTMTRDTSTNTFYVELSSLRS |
| | | acid | EDTALYYCAISGNTRAFEIWGQGTMVTVSL |
| | | sequence | |
| 1136 | YANG-2203c | HCDR1 | GYALTSFY |
| 1137 | YANG-2203c | HCDR2 | IKPSGGDT |
| 1138 | YANG-2203c | HCDR3 | AISGNTRAFEI |
| 1139 | YANG-2203c | VL domain | CAGTCTGTGTTGACGCAGCCGCCCTCAGTGTCTGCGGCCCCAGG |
| | | nucleic | ACAGAAGGTCACCATCTCCTGCTCTGGAAGCAGCTCCAACATTG |
| | | acid | GGAATAATTTTGTATCCTGGTACCAGCAGCTCCCAGGAATGGTC |
| | | sequence | CCCAAACTCCTCATTTATGCCAATAATAAGCGACCCTCAGGGAT |
| | | | TCCTGACCGATTCTCTGGCTCCAGGTCTGGCACGTCAGCCACCC |
| | | | TGGGCATCACCGGACTCCAGACTGGGGACGAGGCCGATTATTAC |
| | | | TGCGGAACTTGGGATAGTAGTCGGAGTGCTGTGCTTTTCGGCGG |
| | | | AGGGACCAAGATGACCGTCCTA |
| 1140 | YANG-2203c | VL domain | QSVLTQPPSVSAAPGQKVTISCSGSSSNIGNNFVSWYQQLPGMV |
| | | amino | PKLLIYANNKRPSGIPDRFSGSRSGTSATLGITGLQTGDEADYY |
| | | acid | CGTWDSSRSAVLFGGGTKMTVL |
| | | sequence | |
| 1141 | YANG-2203c | LCDR1 | SSNIGNNE |
| 1142 | YANG-2203c | LCDR2 | ANN |
| 1143 | YANG-2203c | LCDR3 | GTWDSSRSAVL |
| 1144 | YANG-2203d | VH domain | CAGGTGCAACTGGTGCAGTCTGGGGCTGAGGTGAAGCAGCCTGG |
| | | nucleic | GGCCTCAGTGAAGGTTTCCTGTAGGGCATCTGGATACGCCCTCA |
| | | acid | CCAGCTTCTATGTTCACTGGGTGCGACAGGCCCCTGGACAAGGG |
| | | sequence | CTTGAGTGGATGGGCATAATCAAACCCAGTGGTGGTGACACAAT |
| | | | CTACGCTCAGAATCTCCAGGGCAGAGTCACCATGACCAGGGACA |
| | | | CGTCCACGAACACATTCTACGTGGAACTGAGCAGCCTGAGATCT |
| | | | GAGGACACGGCCCTATATTACTGTGCGATCAGTGGGAACACTAG |
| | | | GGCTTTTGAAATCTGGGGCCAAGGGACAATGGTCACCGTCTCTT |
| | | | TA |
| 1145 | YANG-2203d | VH domain | QVQLVQSGAEVKQPGASVKVSCRASGYALTSFYVHWVRQAPGQG |
| | | amino | LEWMGIIKPSGGDTIYAQNLQGRVTMTRDTSTNTFYVELSSLRS |
| | | acid | EDTALYYCAISGNTRAFEIWGQGTMVTVSL |
| | | sequence | |
| 1146 | YANG-2203d | HCDR1 | GYALTSFY |
| 1147 | YANG-2203d | HCDR2 | IKPSGGDT |
| 1148 | YANG-2203d | HCDR3 | AISGNTRAFEI |
| 1149 | YANG-2203d | VL domain | CAGTCTGTGTTGACGCAGCCGCCCTCAGTGTCTGCGGCCCCAGG |
| | | nucleic | ACAGAAGGTCACCATCTCCTGTTCTGGAAGCAGCTCCAACATTG |
| | | acid | GGAATAATTTTGTCTCCTGGTACCAGCAGCTCCCAGGAATGGTC |
| | | sequence | CCCAAACTCCTCATTTATGCCAATAATAAGCGACCCTCAGGGAT |
| | | | TCCTGACCGATTCTCTGGCTCCAGGTCTGGCACGTCAGCCACCC |
| | | | TGGGCATCACCGGACTCCAGACTGGGGACGAGGCCGATTATTAC |
| | | | TGCGGAACTTGGGATAGTAGTCGGAGTGTTGTGCTTTTCGGCGG |
| | | | AGGGACCAAGATGACCGTCCTA |
| 1150 | YANG-2203d | VL domain | QSVLTQPPSVSAAPGQKVTISCSGSSSNIGNNFVSWYQQLPGMV |
| | | amino | PKLLIYANNKRPSGIPDRESGSRSGTSATLGITGLQTGDEADYY |
| | | acid | CGTWDSSRSVVLFGGGTKMTVL |
| | | sequence | |
| 1151 | YANG-2203d | LCDR1 | SSNIGNNE |
| 1152 | YANG-2203d | LCDR2 | ANN |
| 1153 | YANG-2203d | LCDR3 | GTWDSSRSVVL |
| 1154 | YANG-2203e | VH domain | CAGGTGCAACTGGTGCAGTCTGGGGCTGAGGTGAAGCAGCCTGG |
| | | nucleic | GGCCTCAGTGAAGGTTTCCTGCAAGGCATCTGGATACGCCCTCA |
| | | acid | CCAGCTTCTATGTTCACTGGGTGCGACAGGCCCCTGGACAAGGG |
| | | sequence | CTTGAGTGGATGGGCATAATCAAACCTAGTGGTGGTAACACAAT |
| | | | CTACGCTCAGAATTTCCAGGGCAGAGTCACCATGACCAGGGACA |
| | | | CGTCCACGAACACATTCTACGTGGAACTGAACAGCCTGAGATCT |
| | | | GAGGACACGGCCCTATATTACTGTGCGATCAGTGGGAACACTAG |
| | | | GGCTTTTGAAATCTGGGGCCAGGGGACAATGGTCACCGTCTCTT |
| | | | CA |
| 1155 | YANG-2203e | VH domain | QVQLVQSGAEVKQPGASVKVSCKASGYALTSFYVHWVRQAPGQG |
| | | amino | LEWMGIIKPSGGNTIYAQNFQGRVTMTRDTSTNTFYVELNSLRS |
| | | acid | EDTALYYCAISGNTRAFEIWGQGTMVTVSS |
| | | sequence | |
| 1156 | YANG-2203e | HCDR1 | GYALTSFY |
| 1157 | YANG-2203e | HCDR2 | IKPSGGNT |
| 1158 | YANG-2203e | HCDR3 | AISGNTRAFEI |
| 1159 | YANG-2203e | VL domain | CAGTCTGTGTTGACGCAGCCGCCCTCAGTGTCTGCGGCCCCAGG |
| | | nucleic | ACAGAAGGTCACCATCTCCTGCTCTGGAAGCAGCTCCAACATTG |
| | | acid | GGAATAATTATGTATCCTGGTACCAGCAGTTCCCAGGAATAGTC |
| | | sequence | CCCAAACTCCTCATTTATGCCAATAATAAGCGACCCTCAGGGAT |
| | | | TCCTGACCGATTCTCTGGCTCCAGGTCTGGCACGTCAGCCACCC |
| | | | TGGACATCACCGGACTCCAGACTGGGGACGAGGCCGATTATTAC |
| | | | TGCGGAACTTGGGATAGCAGCCGGAGTGCTGTGCTTTTCGGCGG |
| | | | AGGGACCAAGATGACCGTCCTA |
| 1160 | YANG-2203e | VL domain | QSVLTQPPSVSAAPGQKVTISCSGSSSNIGNNYVSWYQQFPGIV |
| | | amino | PKLLIYANNKRPSGIPDRESGSRSGTSATLDITGLQTGDEADYY |
| | | acid | CGTWDSSRSAVLFGGGTKMTVL |
| | | sequence | |
| 1161 | YANG-2203e | LCDR1 | SSNIGNNY |
| 1162 | YANG-2203e | LCDR2 | ANN |
| 1163 | YANG-2203e | LCDR3 | GTWDSSRSAVL |
| 1164 | YANG-2203f | VH domain | CAGGTGCAACTGGTGCAGTCTGGGGCTGAGGTGAAGCAGCCGGG |
| | | nucleic | GGCCTCAGTGAAGGTCTCCTGCAAGGCATCTGGATACGCCCTCA |
| | | acid | CCAGCTTCTATGTTCACTGGGTGCGACAGGCCCCTGGACAAGGG |
| | | sequence | CTTGAGTGGATGGGCATAATCAAACCTAGTGGTGGTAACACAAT |
| | | | CTACGCTCAGAATTTCCAGGGCAGAGTCACCATGACCAGGGACA |
| | | | CGTCCACGAACACATTCTACGTGGAACTAAACAGCCTGAGATCT |
| | | | GAGGACACGGCCCTATATTACTGTGCGATCAGTGGGAACACTAG |
| | | | GGCTTTTGAAATCTGGGGCCAAGGGACAATGGTCACCGTCTCTT |
| | | | TA |
| 1165 | YANG-2203f | VH domain | QVQLVQSGAEVKQPGASVKVSCKASGYALTSFYVHWVRQAPGQG |
| | | amino | LEWMGIIKPSGGNTIYAQNFQGRVTMTRDTSTNTFYVELNSLRS |
| | | acid | EDTALYYCAISGNTRAFEIWGQGTMVTVSL |
| | | sequence | |
| 1166 | YANG-2203f | HCDR1 | GYALTSFY |
| 1167 | YANG-2203f | HCDR2 | IKPSGGNT |
| 1168 | YANG-2203f | HCDR3 | AISGNTRAFEI |
| 1169 | YANG-2203f | VL domain | CAGTCTGTGTTGACGCAGCCGCCCTCAGTGTCTGCGGCCCCAGG |
| | | nucleic | ACAGAAGGTCACCATCTCCTGCTCTGGAAGCAGCTCCAACATTG |
| | | acid | GGAATAATTATGTATCCTGGTACCAGCAGCTCCCAGGAATAGTC |
| | | sequence | CCCAAGCTCCTCATTTATGCCAATAATAAGCGACCCTCAGGGAT |
| | | | TCCTGACCGATTCTCTGGCTCCAGGTCTGGCACGTCAGCCACCC |
| | | | TGGGCATCACCGGACTCCAGACTGGGGACGAGGCCGATTATTAC |
| | | | TGCGGAACTTGGGATAGCAGCCGGAGTGCTGTACTTTTCGGCGG |
| | | | AGGGACCAAGATGACCGTCCTA |
| 1170 | YANG-2203£ | VL domain | QSVLTQPPSVSAAPGQKVTISCSGSSSNIGNNYVSWYQQLPGIV |
| | | amino | PKLLIYANNKRPSGIPDRESGSRSGTSATLGITGLQTGDEADYY |
| | | acid | CGTWDSSRSAVLFGGGTKMTVL |
| | | sequence | |
| 1171 | YANG-2203f | LCDR1 | SSNIGNNY |
| 1172 | YANG-2203f | LCDR2 | ANN |
| 1173 | YANG-2203f | LCDR3 | GTWDSSRSAVL |
| 1174 | YANG-2203g | VH domain | CAGGTGCAACTGGTGCAGTCTGGGGCTGAGGTGAAGCAGCCTGG |
| | | nucleic | GGCCTCAGTGAAGGTTTCCTGCAGGGCATCTGGATACGCCCTCA |
| | | acid | CCAGCTTCTATGTTCACTGGGTGCGACAGGCCCCTGGACAAGGG |
| | | sequence | CTTGAGTGGATGGGCATAATCAAACCCAGTGGTGGTGACACAAT |
| | | | CTACGCTCAGAATCTCCAGGGCAGAGTCACCATGACCAGGGACA |
| | | | CGTCCACGAACACATTCTACGTGGAACTGAGCAGCCTGAGATCT |
| | | | GAGGACACGGCCCTTTATTACTGTGCGATCAGTGGGAACACTAG |
| | | | GGCTTTTGAAATCTGGGGCCAAGGGACAATGGTCACCGTCTCTT |
| | | | TA |
| 1175 | YANG-2203g | VH domain | QVQLVQSGAEVKQPGASVKVSCRASGYALTSFYVHWVRQAPGQG |
| | | amino | LEWMGIIKPSGGDTIYAQNLQGRVTMTRDTSTNTFYVELSSLRS |
| | | acid | EDTALYYCAISGNTRAFEIWGQGTMVTVSL |
| | | sequence | |
| 1176 | YANG-2203g | HCDR1 | GYALTSFY |
| 1177 | YANG-2203g | HCDR2 | IKPSGGDT |
| 1178 | YANG-2203g | HCDR3 | AISGNTRAFEI |
| 1179 | YANG-2203g | VL domain | CAGTCTGTGTTGACGCAGCCGCCCTCAGTGTCTGCGGCCCCAGG |
| | | nucleic | ACAGAAGGTCACCATCTCCTGCTCTGGAAGCAGCTCCAACATTG |
| | | acid | GGAATAATTTTGTATCCTGGTACCAGCAGCTCCCAGGAATGGTC |
| | | sequence | CCCAAACTCCTCATTTATGCCAATAATAAGCGACCCTCAGGGAT |
| | | | TCCTGACCGATTCTCTGGCTCCAGGTCTGGCACGTCAGCCACCC |
| | | | TGGGCATCACCGGACTCCAGACTGGGGACGAGGCCGATTATTAC |
| | | | TGCGGAACTTGGGATAGTAGTCGGAGTGCTGTGCTTTTCGGCGG |
| | | | AGGGACCAAGATGACCGTCCTA |
| 1180 | YANG-2203g | VL domain | QSVLTQPPSVSAAPGQKVTISCSGSSSNIGNNFVSWYQQLPGMV |
| | | amino | PKLLIYANNKRPSGIPDRESGSRSGTSATLGITGLQTGDEADYY |
| | | acid | CGTWDSSRSAVLFGGGTKMTVL |
| | | sequence | |
| 1181 | YANG-2203g | LCDR1 | SSNIGNNF |
| 1182 | YANG-2203g | LCDR2 | ANN |
| 1183 | YANG-2203g | LCDR3 | GTWDSSRSAVL |
| 1184 | YANG-2203h | VH domain | CAGGTGCAACTGGTGCAGTCTGGGGCTGAGGTGAAGCAGCCTGG |
| | | nucleic | GGCCTCAGTGAAGGTTTCCTGCAGGGCATCTGGATACGCCCTCA |
| | | acid | CCAGCTTCTATGTTCACTGGGTGCGACAGGCCCCTGGACAAGGA |
| | | sequence | CTTGACTGGATGGGCATAATCAAACCCAGTGGTGGTTATACAAT |
| | | | TTACGCTCAGAATCTCCAGGGCAGAGTCACCATGACCAGGGACA |
| | | | CGTCCACGAACACATTCTACGTGGAACTGAGCAGCCTGAGATCT |
| | | | GAGGACACGGCCCTATATTACTGTGCGATCAGTGGGAACACTAG |
| | | | GGCTTTTGAAATCTGGGGCCAAGGGACAATGGTCACCGTCTCTT |
| | | | TA |
| 1185 | YANG-2203h | VH domain | QVQLVQSGAEVKQPGASVKVSCRASGYALTSFYVHWVRQAPGQG |
| | | amino | LDWMGIIKPSGGYTIYAQNLQGRVTMTRDTSTNTFYVELSSLRS |
| | | acid | EDTALYYCAISGNTRAFEIWGQGTMVTVSL |
| | | sequence | |
| 1186 | YANG-2203h | HCDR1 | GYALTSFY |
| 1187 | YANG-2203h | HCDR2 | IKPSGGYT |
| 1188 | YANG-2203h | HCDR3 | AISGNTRAFEI |
| 1189 | YANG-2203h | VL domain | CAGTCTGTGTTGACGCAGCCGCCCTCAGTGTCTGCGGCCCCAGG |
| | | nucleic | ACAGAAGGTCACCATCTCCTGCTCTGGAAGCAGCTCCAACATTG |
| | | acid | GGAATAATTTTGTATCCTGGTACCAGCAGCTCCCAGGAATGGTC |
| | | sequence | CCCAAACTCCTCATTTATGCCAATAATAAGCGACCCTCAGGGAT |
| | | | TCCTGACCGATTCTCTGGCTCCAGGTCTGGCACGTCAGCCACCC |
| | | | TGGGCATCACCGGACTCCAGACTGGGGACGAGGCCGATTATTAC |
| | | | TGCGGAACTTGGGATAGTAGTCGGAGTGCTGTGCTTTTCGGCGG |
| | | | AGGGACCAAGATGACCGTCCTA |
| 1190 | YANG-2203h | VL domain | QSVLTQPPSVSAAPGQKVTISCSGSSSNIGNNFVSWYQQLPGMV |
| | | amino | PKLLIYANNKRPSGIPDRFSGSRSGTSATLGITGLQTGDEADYY |
| | | acid | CGTWDSSRSAVLFGGGTKMTVL |
| | | sequence | |
| 1191 | YANG-2203h | LCDR1 | SSNIGNNE |
| 1192 | YANG-2203h | LCDR2 | ANN |
| 1193 | YANG-2203h | LCDR3 | GTWDSSRSAVL |
| 1194 | YANG-2203i | VH domain | CAGGTGCAACTGGTGCAGTCTGGGGCTGAGGTGAAGCAGCCTGG |
| | | nucleic | GGCCTCAGTGAAGGTTTCCTGCAGGGCATCTGGATACGCCCTCA |
| | | acid | CCAACTTCTATATTCACTGGGTGCGACAGGCCCCTGGACAAGGG |
| | | sequence | CTTGAGTGGATGGGCATAATCAAACCCAGTGGTGGTGACACAAT |
| | | | CTACGCTCAGAATCTCCAGGGCAGAGTCACCATGACCAGGGACA |
| | | | CGTCCACGGACACATTCTACGTGGAACTGAACAGCCTGAGATCT |
| | | | GAGGACACGGCCCTATATTACTGTGCGATCAGTGGGAACACTAG |
| | | | GGCTTTTGAAATCTGGGGCCAAGGGACAATGGTCACCGTCTCTT |
| | | | TA |
| 1195 | YANG-2203i | VH domain | QVQLVQSGAEVKQPGASVKVSCRASGYALTNFYIHWVRQAPGQG |
| | | amino | LEWMGIIKPSGGDTIYAQNLQGRVTMTRDTSTDTFYVELNSLRS |
| | | acid | EDTALYYCAISGNTRAFEIWGQGTMVTVSL |
| | | sequence | |
| 1196 | YANG-2203i | HCDR1 | GYALTNFY |
| 1197 | YANG-2203i | HCDR2 | IKPSGGDT |
| 1198 | YANG-2203i | HCDR3 | AISGNTRAFEI |
| 1199 | YANG-2203i | VL domain | CAGTCTGTGTTGACGCAGCCGCCCTCAGTGTCTGCGGCCCCAGG |
| | | nucleic | ACAGAAGGTCACCATCTCCTGCTCTGGAAGCAGCTCCAACATTG |
| | | acid | GGAATAATTTTGTATCCTGGTACCAGCAGCTCCCAGGAATGGTC |
| | | sequence | CCCAAACTCCTCATTTATGCCAATAATAAGCGACCCTCAGGGAT |
| | | | TCCTGACCGATTCTCTGGCTCCAGGTCTGGCACGTCAGCCACCC |
| | | | TGGGCATCACCGGACTCCAGACTGGGGACGAGGCCGATTATTAC |
| | | | TGCGGAACTTGGGATAGTAGTCGGAGTGCTGTGCTTTTCGGCGG |
| | | | AGGGACCAAGATGACCGTCCTA |
| 1200 | YANG-2203i | VL domain | QSVLTQPPSVSAAPGQKVTISCSGSSSNIGNNFVSWYQQLPGMV |
| | | amino | PKLLIYANNKRPSGIPDRFSGSRSGTSATLGITGLQTGDEADYY |
| | | acid | CGTWDSSRSAVLFGGGTKMTVL |
| | | sequence | |
| 1201 | YANG-2203i | LCDR1 | SSNIGNNF |
| 1202 | YANG-2203i | LCDR2 | ANN |
| 1203 | YANG-2203i | LCDR3 | GTWDSSRSAVL |
| 1204 | YANG-2203j | VH domain | CAGGTGCAATTGGTGCAGTCTGGGGCTGAGGTGAAGCAGCCTGG |
| | | nucleic | GGCCTCAGTGAAGGTTTCCTGCAGGGCATCTGGATACGCCCTCA |
| | | acid | CCAGCTTCTATGTTCACTGGGTGCGACAGGCCCCTGGACAAGGG |
| | | sequence | CTTGAGTGGATGGGCATAATCAAACCCAGTGGTGGTGACACAAT |
| | | | CTACGCTCAGAATCTCCAGGGCAGAGTCACCATGACCAGGGACA |
| | | | CGTCCACGAACACATTCTACGTGGAACTGAGCAGCCTGAGATCT |
| | | | GAGGACACGGCCCTATATTACTGTGCGATCAGTGGGAACACTAG |
| | | | GGCTTTTGAAATCTGGGGCCAAGGGACAATGGTCACCGTCTCTT |
| | | | TA |
| 1205 | YANG-2203j | VH domain | QVQLVQSGAEVKQPGASVKVSCRASGYALTSFYVHWVRQAPGQG |
| | | amino | LEWMGIIKPSGGDTIYAQNLQGRVTMTRDTSTNTFYVELSSLRS |
| | | acid | EDTALYYCAISGNTRAFEIWGQGTMVTVSL |
| | | sequence | |
| 1206 | YANG-2203j | HCDR1 | GYALTSFY |
| 1207 | YANG-2203j | HCDR2 | IKPSGGDT |
| 1208 | YANG-2203j | HCDR3 | AISGNTRAFEI |
| 1209 | YANG-2203j | VL domain | CAGTCTGTGTTGACGCAGCCGCCCTCAGTGTCTGCGGCCCCAGG |
| | | nucleic | ACAGAAGGTCACCATCTCCTGCTCTGGAAGCAGCTCCAACATTG |
| | | acid | GGAATAATTTTGTATCCTGGTACCAGCAGCTCCCAGGAATGGTC |
| | | sequence | CCCAAACTCCTCATTTATGCCAATAATAAGCGACCCTCAGGGAT |
| | | | TCCTGACCGATTCTCTGGCTCCAGGTCTGGCACGTCAGCCACCC |
| | | | TGGGCATCACCGGACTCCAGACTGGGGACGAGGCCGATTATTAC |
| | | | TGCGGAACTTGGGATAGTAGTCGGAGTGCTGTGCTTTTCGGCGG |
| | | | AGGGACCAAGATGACCGTCCTA |
| 1210 | YANG-2203j | VL domain | QSVLTQPPSVSAAPGQKVTISCSGSSSNIGNNFVSWYQQLPGMV |
| | | amino | PKLLIYANNKRPSGIPDRFSGSRSGTSATLGITGLQTGDEADYY |
| | | acid | CGTWDSSRSAVLFGGGTKMTVL |
| | | sequence | |
| 1211 | YANG-2203j | LCDR1 | SSNIGNNE |
| 1212 | YANG-2203j | LCDR2 | ANN |
| 1213 | YANG-2203j | LCDR3 | GTWDSSRSAVL |
| 1214 | YANG-2203k | VH domain | CAGGTGCAACTGGTGCAGTCTGGGGCTGAGGTGAAGCAGCCTGG |
| | | nucleic | GGCCTCAGTGAAGGTTTCCTGCAGGGCATCTGGATACGCCCTCA |
| | | acid | CCAGACTCTATGTTCACTGGGTGCGGCAGGCCCCTGGACAAGGG |
| | | sequence | CTTGAGTGGATGGGCATAATCAAACCCAGTGGTGGTGACACAAT |
| | | | CTGCGCTCAGAATCTCCAGGGCAGAGTCACCCTGACCAGGGACA |
| | | | CGTCCACGAACACATTCTACGTGGAACTGAACAGCCTGAGATCT |
| | | | GAGGACACGGCCCTATATTACTGTGCGATCAGTGGGAACACTAG |
| | | | GGCTTTTGAAATCTGGGGCCAAGGGACAATGGTCACCGTCTCTT |
| | | | TA |
| 1215 | YANG-2203k | VH domain | QVQLVQSGAEVKQPGASVKVSCRASGYALTRLYVHWVRQAPGQG |
| | | amino | LEWMGIIKPSGGDTICAQNLQGRVTLTRDTSTNTFYVELNSLRS |
| | | acid | EDTALYYCAISGNTRAFEIWGQGTMVTVSL |
| | | sequence | |
| 1216 | YANG-2203k | HCDR1 | GYALTRLY |
| 1217 | YANG-2203k | HCDR2 | IKPSGGDT |
| 1218 | YANG-2203k | HCDR3 | AISGNTRAFEI |
| 1219 | YANG-2203k | VL domain | CAGTCTGTGTTGACGCAGCCGCCCTCAGTGTCTGCGGCCCCAGG |
| | | nucleic | ACAGAAGGTCACCATCTCCTGCTCTGGAAGCAGCTCCAACATTG |
| | | acid | GGAATAATTTTGTATCCTGGTACCAGCAGCTCCCAGGAATGGTC |
| | | sequence | CCCAAACTCCTCATTTATGCCAATAATAAGCGACCCTCAGGGAT |
| | | | TCCTGACCGATTCTCTGGCTCCAGGTCTGGCACGTCAGCCACCC |
| | | | TGGGCATCACCGGACTCCAGACTGGGGACGAGGCCGATTATTAC |
| | | | TGCGGAACTTGGGATAGTAGTCGGAGTGCGGTGCTTTTCGGCGG |
| | | | AGGGACCAAGATGACCGTCCTA |
| 1220 | YANG-2203k | VL domain | QSVLTQPPSVSAAPGQKVTISCSGSSSNIGNNFVSWYQQLPGMV |
| | | amino | PKLLIYANNKRPSGIPDRFSGSRSGTSATLGITGLQTGDEADYY |
| | | acid | CGTWDSSRSAVLFGGGTKMTVL |
| | | sequence | |
| 1221 | YANG-2203k | LCDR1 | SSNIGNNF |
| 1222 | YANG-2203k | LCDR2 | ANN |
| 1223 | YANG-2203k | LCDR3 | GTWDSSRSAVL |
| 1224 | YANG-2204 | VH domain | CAGATGCAGCTGGTACAGTCTGGGGCTGAGGTGAAGAAGCCTGG |
| | | nucleic | GGCCTCAGTGAAGTTTTCCTGCAAGACATCTGGATACACCTTCA |
| | | acid | CCAACTACTATATGGTCTGGGTGCGACAGGCCCCTGGACAAGGA |
| | | sequence | CTTGAGTGGATGGGCATAATCAAACCTAGTGGTGGTAACACAAT |
| | | | CTATGCACAGAAGTTCCAGGGCAGAGTCACCATGACCAGGGACA |
| | | | CGTCCACGAACACAGTCTACATGGACCTGACCAGTCTGAGATCT |
| | | | GAAGACACGGCCGTATATTATTGTGCGAGAACTGGGGATAGGGC |
| | | | TTTTGATGTCTGGGGCCAAGGGACAATGGTCACCGTCTCTTCA |
| 1225 | YANG-2204 | VH domain | QMQLVQSGAEVKKPGASVKFSCKTSGYTFTNYYMVWVRQAPGQG |
| | | amino | LEWMGIIKPSGGNTIYAQKFQGRVTMTRDTSTNTVYMDLTSLRS |
| | | acid | EDTAVYYCARTGDRAFDVWGQGTMVTVSS |
| | | sequence | |
| 1226 | YANG-2204 | HCDR1 | GYTFTNYY |
| 1227 | YANG-2204 | HCDR2 | IKPSGGNT |
| 1228 | YANG-2204 | HCDR3 | ARTGDRAFDV |
| 1229 | YANG-2204 | VL domain | CAGTCTGTGTTGACGCAGCCGCCCTCAGTGTCTGCGGCCCCAGG |
| | | nucleic | ACAGAAGGTCACCATCTCCTGCTCTGGAAGCAGCTCCAACATTG |
| | | acid | GGAATAATTATGTCTCCTGGTACCAGCAGCTCCCAGGAACAGCC |
| | | sequence | CCCAAACTCCTCATTTATGACAATAATAAGCGCCCCTCAGGGAT |
| | | | TCCTGACCGATTCTCTGGCTCCAAGTCTGGCACGTCAGCCACCC |
| | | | TGGGCATCACCGGACTCCAGACTGGGGACGAGGCCGATTATTAC |
| | | | TGCGGAACATGGGATAGCAGCCTGGGTGCTGGGGTGTTCGGCGG |
| | | | AGGGACCAAACTGACCGTCCTA |
| 1230 | YANG-2204 | VL domain | QSVLTQPPSVSAAPGQKVTISCSGSSSNIGNNYVSWYQQLPGTA |
| | | amino | PKLLIYDNNKRPSGIPDRFSGSKSGTSATLGITGLQTGDEADYY |
| | | acid | CGTWDSSLGAGVFGGGTKLTVL |
| | | sequence | |
| 1231 | YANG-2204 | LCDR1 | SSNIGNNY |
| 1232 | YANG-2204 | LCDR2 | DNN |
| 1233 | YANG-2204 | LCDR3 | GTWDSSLGAGV |
| 1234 | YANG-2205 | VH domain | CAGATTCAGTTGGTGCAGTCTGGGGCTGAGGTGAAGAAGCCTGG |
| | | nucleic | GGCCTCAGTGAAGTTTTCCTGCAAGACATCTGGATACACCTTCA |
| | | acid | CCAGCTACTATATGGTCTGGGTGCGACAGGCCCCTGGACAAGGA |
| | | sequence | CTTGAGTGGATGGGCATAATCAAACCTAGTGGTGGTAACACAAT |
| | | | CTACGCACAGAAGTTCCAGGGCAGAGTCACCATGACCAGGGACA |
| | | | CGTCCACGAACACAGTCTACATGGACCTGAGCAGTCTGAGATCT |
| | | | GAGGACACGGCCGTGTATTATTGTGCGAGAACTGGGGATAGGGC |
| | | | TTTTGATGTCTGGGGCCACGGGACAATGATCACCGTCTCTTCA |
| 1235 | YANG-2205 | VH domain | QIQLVQSGAEVKKPGASVKFSCKTSGYTFTSYYMVWVRQAPGQG |
| | | amino | LEWMGIIKPSGGNTIYAQKFQGRVTMTRDTSINTVYMDLSSLRS |
| | | acid | EDTAVYYCARTGDRAFDVWGHGTMITVSS |
| | | sequence | |
| 1236 | YANG-2205 | HCDR1 | GYTFTSYY |
| 1237 | YANG-2205 | HCDR2 | IKPSGGNT |
| 1238 | YANG-2205 | HCDR3 | ARTGDRAFDV |
| 1239 | YANG-2205 | VL domain | CAGTCTGTATTGACGCAGCCGCCCTCAGTGTCTGCGGCCCCAGG |
| | | nucleic | ACAGAAGGTCACCATCTCCTGCTCTGGAAGCAGCTCCAACATTG |
| | | acid | GGAATAATTTTGTATCCTGGTACCAACAGTTCCCAGGAACAGCC |
| | | sequence | CCCAAACTCCTCATTTATGACAATAATAAGCGACCCTCAGGGAT |
| | | | TCCTGACCGATTCTCTGGCTCCAAGTCTGGCACGTCAGCCACCC |
| | | | TGGGCATCACCGGACTCCAGACTGGGGACGAGGCCGATTATTAC |
| | | | TGCGGAACATGGGATAGCAGCCTGGGTGCTGGGGTGTTCGGCGG |
| | | | AGGGACCAAGCTGACCGTCCTA |
| 1240 | YANG-2205 | VL domain | QSVLTQPPSVSAAPGQKVTISCSGSSSNIGNNFVSWYQQFPGTA |
| | | amino | PKLLIYDNNKRPSGIPDRFSGSKSGTSATLGITGLQTGDEADYY |
| | | acid | CGTWDSSLGAGVFGGGTKLTVL |
| | | sequence | |
| 1241 | YANG-2205 | LCDR1 | SSNIGNNF |
| 1242 | YANG-2205 | LCDR2 | DNN |
| 1243 | YANG-2205 | LCDR3 | GTWDSSLGAGV |
| 1244 | YANG-2206 | VH domain | CAGATTCAGTTGGTGCAGTCTGGGGCTGAGGTGAAGAAGCCTGG |
| | | nucleic | GGCCTCAGTGAAACTTTCCTGCAAGACATCTGGATACACCTTCA |
| | | acid | CCAGCTACTATATGGTCTGGGTGCGACAGGCCCCTGGACAAGGA |
| | | sequence | CTTGAGTGGATGGGCATAATCAAACCTAGTGGTGGTAACACAAT |
| | | | CTTCGCACAGAAGTTCCAGGGCAGAGTCACCATGACCAGGGACA |
| | | | CGTCCACGAACACAGTCTACATGGACCTGAACAGTCTGAGATCT |
| | | | GAGGACACGGCCGTCTATTATTGTGCGAGAACTGGAGATAGGGC |
| | | | TTTTGATGTCTGGGGCCACGGGACAATGGTCACCGTGTCTTCA |
| 1245 | YANG-2206 | VH domain | QIQLVQSGAEVKKPGASVKLSCKTSGYTFTSYYMVWVRQAPGQG |
| | | amino | LEWMGIIKPSGGNTIFAQKFQGRVTMTRDTSTNTVYMDLNSLRS |
| | | acid | EDTAVYYCARTGDRAFDVWGHGTMVTVSS |
| | | sequence | |
| 1246 | YANG-2206 | HCDR1 | GYTFTSYY |
| 1247 | YANG-2206 | HCDR2 | IKPSGGNT |
| 1248 | YANG-2206 | HCDR3 | ARTGDRAFDV |
| 1249 | YANG-2206 | VL domain | CAGTCTGTGTTGACGCAGCCGCCCTCAGTGTCTGCGGCCCCAGG |
| | | nucleic | ACAGAAGGTCACCATCTCCTGCTCTGGAAGCAGCTCCAACATTG |
| | | acid | GGAATAATTATGTATCCTGGTACCAGCAGTTCCCAGGAACAGCC |
| | | sequence | CCCAAACTCCTCATTTATGACAATAATAAGCGACCCTCAGGGAT |
| | | | TCCTGACCGATTCTCTGGCTCCAAGTCTGGCACGTCAGCCACCC |
| | | | TGGGCATCACCGGACTCCAGACTGGGGACGAGGCCGATTATTAC |
| | | | TGCGGAACATGGGATAGCAGCCTGGGTGCTGGGGTGTTCGGCGG |
| | | | AGGGACCAAGGTGACCGTCCTA |
| 1250 | YANG-2206 | VL domain | QSVLTQPPSVSAAPGQKVTISCSGSSSNIGNNYVSWYQQFPGTA |
| | | amino | PKLLIYDNNKRPSGIPDRFSGSKSGTSATLGITGLQTGDEADYY |
| | | acid | CGTWDSSLGAGVFGGGTKVTVL |
| | | sequence | |
| 1251 | YANG-2206 | LCDR1 | SSNIGNNY |
| 1252 | YANG-2206 | LCDR2 | DNN |
| 1253 | YANG-2206 | LCDR3 | GTWDSSLGAGV |
| 1254 | YANG-2207 | VH domain | CAGATGCAATTGGTGCAATCTGGGGCTGAGGTGAAGAAGCCTGG |
| | | nucleic | GGCCTCAGTGAAGATTTCCTGCAAGACATCTGGATACACCTTCA |
| | | acid | CCAACTACTATATGGTCTGGGTGCGACAGGCCCCTGGACAAGGA |
| | | sequence | CTTGAGTGGATGGGCATAATCAAACCTAGTGGTGGTAACACGAT |
| | | | CTACGCACAGAAGTTCCAGGGCAGAGTCACCATGACCAGGGACA |
| | | | CGTCCACGAACACAGTCTATTTGGACCTGAGCAGTCTGAGATCT |
| | | | GAGGACACGGCCGTCTATTATTGTGCGAGAACTGGGAATAGGGC |
| | | | TTTTGATGTCTGGGGCCACGGGACAATGGTCACCGTCTCTTCA |
| 1255 | YANG-2207 | VH domain | QMQLVQSGAEVKKPGASVKISCKTSGYTFTNYYMVWVRQAPGQG |
| | | amino | LEWMGIIKPSGGNTIYAQKFQGRVTMTRDTSTNTVYLDLSSLRS |
| | | acid | EDTAVYYCARTGNRAFDVWGHGTMVTVSS |
| | | sequence | |
| 1256 | YANG-2207 | HCDR1 | GYTFTNYY |
| 1257 | YANG-2207 | HCDR2 | IKPSGGNT |
| 1258 | YANG-2207 | HCDR3 | ARTGNRAFDV |
| 1259 | YANG-2207 | VL domain | CAGTCTGTGTTGACGCAGCCGCCCTCAGTGTCTGCGGCCCCAGG |
| | | nucleic | ACAGAAGGTCACCATCTCCTGCTCTGGAAGCAGCTCCAACATTG |
| | | acid | GGAATAATTTTGTTTCCTGGTACCAGCAGTTCCCAGGAACAGCC |
| | | sequence | CCCAAACTCCTCATTTATGACAATAATAAGCGACCCTCAGGGAT |
| | | | TCCTGACCGATTCTCTGGCTCCAAGTCTGGCACGTCAGCCACCC |
| | | | TGGGCATCACCGGACTCCAGACTGGGGACGAGGCCGATTATTAC |
| | | | TGCGGAACATGGGATAGCAGCCTGGGTGCTGGGGTGTTCGGCGG |
| | | | AGGGACCAAGCTGACCGTCCTA |
| 1260 | YANG-2207 | VL domain | QSVLTQPPSVSAAPGQKVTISCSGSSSNIGNNFVSWYQQFPGTA |
| | | amino | PKLLIYDNNKRPSGIPDRFSGSKSGTSATLGITGLQTGDEADYY |
| | | acid | CGTWDSSLGAGVFGGGTKLTVL |
| | | sequence | |
| 1261 | YANG-2207 | LCDR1 | SSNIGNNF |
| 1262 | YANG-2207 | LCDR2 | DNN |
| 1263 | YANG-2207 | LCDR3 | GTWDSSLGAGV |
| 1264 | YANG-2208 | VH domain | CAGATACAGCTGGTGCAGTCTGGGGCTGAGGTGAGGAAGCCTGG |
| | | nucleic | GGCCTCAGTGAGGTTTTCCTGCAAGACATCTGGATACATTTTCA |
| | | acid | CCAACTACTATATGGTCTGGGTGCGACAGGCCCCTGGACAAGGA |
| | | sequence | CTTGAGTGGATGGGCATAATCAAACCTAGTGGAGGTAACACAAT |
| | | | CTACGCACAGAAGTTCCAGGGCAGAGTCACCATGACCAGGGACA |
| | | | CGTCCACTAACACAGTCTACATGGACCTGAATAATCTGAGATCT |
| | | | GAGGACACGGCCGTGTATTTTTGTGCGAGAACTGGTGATAGGGC |
| | | | TTTTGATGTCTGGGGCCAAGGGACAATGGTCACCGTCTCTTCA |
| 1265 | YANG-2208 | VH domain | QIQLVQSGAEVRKPGASVRFSCKTSGYIFTNYYMVWVRQAPGQG |
| | | amino | LEWMGIIKPSGGNTIYAQKFQGRVTMTRDTSTNTVYMDLNNLRS |
| | | acid | EDTAVYFCARTGDRAFDVWGQGTMVTVSS |
| | | sequence | |
| 1266 | YANG-2208 | HCDR1 | GYIFTNYY |
| 1267 | YANG-2208 | HCDR2 | IKPSGGNT |
| 1268 | YANG-2208 | HCDR3 | ARTGDRAFDV |
| 1269 | YANG-2208 | VL domain | CAGTCTGTGTTGACGCAGCCGCCCTCAATGTCTGCGGCCCCAGG |
| | | nucleic | ACAGAAGGTCACCATCTCCTGCTCTGGAAACAGCTCCAACATTG |
| | | acid | GGAATAATTTTGTATCCTGGTACCGGCAGTTCCCCGGAACAGCC |
| | | sequence | CCCAAACTCCTCATTTATGACAATAATAAGCGACCCTCAGGGAT |
| | | | TCCTGACCGATTCTCTGGCTCCAAGTCTGGCACGTCAGCCACCC |
| | | | TGGGCATCACCGGACTCCAGACTGGGGACGAGGCCGATTATTAC |
| | | | TGCGGGACATGGGATAGCAGCCTGAGTGCTGGGGTGTTCGGCGG |
| | | | AGGGACCAAGCTGACCGTCCTA |
| 1270 | YANG-2208 | VL domain | QSVLTQPPSMSAAPGQKVTISCSGNSSNIGNNFVSWYRQFPGTA |
| | | amino | PKLLIYDNNKRPSGIPDRFSGSKSGTSATLGITGLQTGDEADYY |
| | | acid | CGTWDSSLSAGVFGGGTKLTVL |
| | | sequence | |
| 1271 | YANG-2208 | LCDR1 | SSNIGNNE |
| 1272 | YANG-2208 | LCDR2 | DNN |
| 1273 | YANG-2208 | LCDR3 | GTWDSSLSAGV |
| 1274 | YANG-2209 | VH domain | CAGATGCAGTTGGTGCAGTCTGGGGCTGAGGTGAAGAAGCCTGG |
| | | nucleic | GGCCTCAGTGAAGTTTTCCTGCAAGACATCTGGATACACCTTCA |
| | | acid | CCAACTTCTATATGGTCTGGGTGCGACAGGCCCCTGGACAAGGA |
| | | sequence | CTTGAGTGGATGGGCATAATCAAACCTAGTGGTGGTGACACAAT |
| | | | CTACGCACAGAAGTTCCAGGGCAGAGTCACCATGACCAGGGACA |
| | | | CGTCCACGAACACAGTCTACATGGACCTGAACAGTCTGACATCT |
| | | | GAGGACACGGCCGTATATTATTGTGCGAGAATTGGGAATAGGGC |
| | | | TTTTGATGTCTGGGGCCACGGGACAATGGTCACCGTCTCTTCA |
| 1275 | YANG-2209 | VH domain | QMQLVQSGAEVKKPGASVKFSCKTSGYTFTNFYMVWVRQAPGQG |
| | | amino | LEWMGIIKPSGGDTIYAQKFQGRVTMTRDTSTNTVYMDLNSLTS |
| | | acid | EDTAVYYCARIGNRAFDVWGHGTMVTVSS |
| | | sequence | |
| 1276 | YANG-2209 | HCDR1 | GYTFTNFY |
| 1277 | YANG-2209 | HCDR2 | IKPSGGDT |
| 1278 | YANG-2209 | HCDR3 | ARIGNRAFDV |
| 1279 | YANG-2209 | VL domain | CAGTCTGTGTTGACGCAGCCGCCCTCAGTGTCTGCGGCCCCAGG |
| | | nucleic | ACAGAAAGTCACCATCTCCTGCTCTGGAAGCAGCTCCAATATTG |
| | | acid | GGAATAATTTTGTATCCTGGTACCAGCAGTTTTCAGGAACAGCC |
| | | sequence | CCCAAACTCCTCATTTATGACAATTCTAAGCGACCCTCAGGGAT |
| | | | TCCTGACCGATTCTCTGGCTCCAAGTCTGGCACGTCAGCCACCC |
| | | | TGGGCATCACCGGACTCCAGACTGGGGACGAGGCCGATTATTAC |
| | | | TGCGGAACATGGGATAGCAGCCTGGGTGCTGGGGTGTTCGGCGG |
| | | | AGGGACCAAACTGACCGTCCTA |
| 1280 | YANG-2209 | VL domain | QSVLTQPPSVSAAPGQKVTISCSGSSSNIGNNFVSWYQQFSGTA |
| | | amino | PKLLIYDNSKRPSGIPDRFSGSKSGTSATLGITGLQTGDEADYY |
| | | acid | CGTWDSSLGAGVFGGGTKLTVL |
| | | sequence | |
| 1281 | YANG-2209 | LCDR1 | SSNIGNNF |
| 1282 | YANG-2209 | LCDR2 | DNS |
| 1283 | YANG-2209 | LCDR3 | GTWDSSLGAGV |
| 1284 | YANG-2210 | VH domain | CAGATTCAGTTGGTGCAGTCTGGGGCTGAGGTGAAGAAGCCTGG |
| | | nucleic | GGCCTCAGTGAAGTTTTCCTGCAAGACATCTGGATACACCTTCA |
| | | acid | CCAGCTACTATATGGTCTGGGTGCGACAGGCCCCTGGACAAGGA |
| | | sequence | CTTGAGTGGATGGGCATAATCAAACCTAGTGGTGGTAACACAAT |
| | | | CTACGCACAGAAGTTCCAGGGCAGAGTCACCATGACCAGGGACA |
| | | | CGTCCACGAACACAGTCTACATGGACCTGAACAGTCTGAAATCT |
| | | | GAGGACACGGCCGTCTATTATTGTGCGAGAACTGGAGATTGGGC |
| | | | TTTTGATGTCTGGGGCCACGGGACAATGGTCACCGTGTCTTCA |
| 1285 | YANG-2210 | VH domain | QIQLVQSGAEVKKPGASVKFSCKTSGYTFTSYYMVWVRQAPGQG |
| | | amino | LEWMGIIKPSGGNTIYAQKFQGRVTMTRDTSTNTVYMDLNSLKS |
| | | acid | EDTAVYYCARTGDWAFDVWGHGTMVTVSS |
| | | sequence | |
| 1286 | YANG-2210 | HCDR1 | GYTFTSYY |
| 1287 | YANG-2210 | HCDR2 | IKPSGGNT |
| 1288 | YANG-2210 | HCDR3 | ARTGDWAFDV |
| 1289 | YANG-2210 | VL domain | CAGTCTGTGTTGACGCAGCCGCCCTCAGTGTCTGCGGCCCCAGG |
| | | nucleic | ACAGAAGGTCACCATCTCCTGCTCTGGAAGCAGCTCCAACATTG |
| | | acid | GGAATAATTATGTATCCTGGTACCAGCAGTTCCCAGGAACAGCC |
| | | sequence | CCCAAACTCCTCATTTATGACAATAATAAGCGACCCTCAGGGAT |
| | | | TCCTGACCGATTCTCTGGCTCCAAGTCTGGCACGTCAGCCACCC |
| | | | TGGGCATCACCGGACTCCAGACTGGGGACGAGGCCGATTATTAC |
| | | | TGCGGAACATGGGATAGCAGCCTGGGTGCTGGGGTGTTCGGCGG |
| | | | AGGGACCAAACTGACCGTCCTA |
| 1290 | YANG-2210 | VL domain | QSVLTQPPSVSAAPGQKVTISCSGSSSNIGNNYVSWYQQFPGTA |
| | | amino | PKLLIYDNNKRPSGIPDRFSGSKSGTSATLGITGLQTGDEADYY |
| | | acid | CGTWDSSLGAGVFGGGTKLTVL |
| | | sequence | |
| 1291 | YANG-2210 | LCDR1 | SSNIGNNY |
| 1292 | YANG-2210 | LCDR2 | DNN |
| 1293 | YANG-2210 | LCDR3 | GTWDSSLGAGV |
| 1294 | YANG-2211 | VH domain | CAGATACAACTGGTGCAGTCTGGGGCTGAGGTGAAGAAGCCTGG |
| | | nucleic | GGCCTCTGTGAGGTTTTCCTGCAAGACATCTGGATACACCTTCA |
| | | acid | CCAACTACTATATGGTCTGGGTGCGACAGGCCCCTGGACAAGGA |
| | | sequence | CTTGAGTGGATGGGCATAATTAAACCTAGTGGTGGTAACACAAT |
| | | | CTACGCACAGAACTTCCAGGGCAGAGTCACCATGACCAGGGACA |
| | | | CGTCCACGAACACAGTCTACATGGACCTGAGGACTCTGAGATCT |
| | | | GAGGACACGGCCGTTTATTATTGTGCGAGAACTGGTGATAGGGC |
| | | | TTTTGATGTCTGGGGCCAAGGGACAATGGTCACCGTCTCTTCA |
| 1295 | YANG-2211 | VH domain | QIQLVQSGAEVKKPGASVRFSCKTSGYTFTNYYMVWVRQAPGQG |
| | | amino | LEWMGIIKPSGGNTIYAQNFQGRVTMTRDTSTNTVYMDLRTLRS |
| | | acid | EDTAVYYCARTGDRAFDVWGQGTMVTVSS |
| | | sequence | |
| 1296 | YANG-2211 | HCDR1 | GYTFTNYY |
| 1297 | YANG-2211 | HCDR2 | IKPSGGNT |
| 1298 | YANG-2211 | HCDR3 | ARTGDRAFDV |
| 1299 | YANG-2211 | VL domain | CAGTCTGTGTTGACGCAGCCGCCCTCAGTGTCTGCGGCCCCAGG |
| | | nucleic | ACAGAAGGTCACCATCTCCTGCTCTGGAAGCAGCTCCAACATTG |
| | | acid | GGAATAATTTTGTATCCTGGTACCAGCAGTTCCCAGGAACAGCC |
| | | sequence | CCCAAACTCCTCATTTATGACAATAATAAGCGACCCTCAGGGAT |
| | | | TCCTGACCGATTCTCTGGCTCCAAGTCTGGCACGTCAGCCACCC |
| | | | TGGGCATCACCGGACTCCAGACTGGGGACGAGGCCGATTATTAC |
| | | | TGCGGAACATGGGATAGCAGCCTGGGTGCTGGGGTGTTCGGCGG |
| | | | AGGGACCAAGCTGACCGTCCTA |
| 1300 | YANG-2211 | VL domain | QSVLTQPPSVSAAPGQKVTISCSGSSSNIGNNFVSWYQQFPGTA |
| | | amino | PKLLIYDNNKRPSGIPDRFSGSKSGTSATLGITGLQTGDEADYY |
| | | acid | CGTWDSSLGAGVFGGGTKLTVL |
| | | sequence | |
| 1301 | YANG-2211 | LCDR1 | SSNIGNNF |
| 1302 | YANG-2211 | LCDR2 | DNN |
| 1303 | YANG-2211 | LCDR3 | GTWDSSLGAGV |
| 1304 | YANG-2212 | VH domain | CAGATGCAGTTGGTGCAGTCTGGGGCTGAGGTGAAGAAGCCTGG |
| | | nucleic | GGCCTCAGTGAAAATTTCCTGCAAGACATCTGGATACACCTTCA |
| | | acid | TCAACTACTATATGGTCTGGGTGCGACAGGCCCCTGGACAAGGA |
| | | sequence | CTTGAGTGGATGGGCATAATCAAACCTAGTGGTGGTAATACGAT |
| | | | CTACGCACAGAAGTTCCAGGGCAGAGTCACCATGACCAGGGACA |
| | | | CGTCCACGAGCACAGTCTATATGGACCTGAGCAGTCTGAGATCT |
| | | | GAGGACACGGCCGTGTATTATTGTGCGAGAACTGGGGATAGGGC |
| | | | TTTTGATGTCTGGGGCCACGGGACAATGGTCACCGTCTCTTCA |
| 1305 | YANG-2212 | VH domain | QMQLVQSGAEVKKPGASVKISCKTSGYTFINYYMVWVRQAPGQG |
| | | amino | LEWMGIIKPSGGNTIYAQKFQGRVTMTRDTSTSTVYMDLSSLRS |
| | | acid | EDTAVYYCARTGDRAFDVWGHGTMVTVSS |
| | | sequence | |
| 1306 | YANG-2212 | HCDR1 | GYTFINYY |
| 1307 | YANG-2212 | HCDR2 | IKPSGGNT |
| 1308 | YANG-2212 | HCDR3 | ARTGDRAFDV |
| 1309 | YANG-2212 | VL domain | CAGTCTGTGTTGACGCAGCCGCCCTCAGTGTCTGCGGCCCCAGG |
| | | nucleic | ACAGAAGGTCACCATCTCCTGCTCTGGAAGCAGCTCCAACATTG |
| | | acid | GGAATAATTATGTTTCCTGGTACCAGCAGTTCCCAGGAACAGCC |
| | | sequence | CCCAAACTCCTCATTTATGACAATCATAAGCGACCCTCAGGGAT |
| | | | TCCTGACCGATTCTCTGCCTCCAAGTCTGGCACGTCAGCCACCC |
| | | | TGGGCATCACCGGACTCCTGACTGGGGACGAGGCCGATTATTAC |
| | | | TGCGGAACATGGGATAGCGGCCTGGGTGCTGGGGTGTTCGGCGG |
| | | | AGGGACCAAGCTGACCGTCCTA |
| 1310 | YANG-2212 | VL domain | QSVLTQPPSVSAAPGQKVTISCSGSSSNIGNNYVSWYQQFPGTA |
| | | amino | PKLLIYDNHKRPSGIPDRFSASKSGTSATLGITGLLTGDEADYY |
| | | acid | CGTWDSGLGAGVFGGGTKLTVL |
| | | sequence | |
| 1311 | YANG-2212 | LCDR1 | SSNIGNNY |
| 1312 | YANG-2212 | LCDR2 | DNH |
| 1313 | YANG-2212 | LCDR3 | GTWDSGLGAGV |
| 1314 | YANG-2213 | VH domain | CAGATACAACTGGTGCAGTCTGGGGCTGAGGTGAAGAAGCCTGG |
| | | nucleic | GGCCTCAGTGAAGTTTTCCTGCAAGACATCTGGATACACCTTTA |
| | | acid | CCAACTACTATATGGTCTGGGTGCGACAGGCCCCTGGACAAGGA |
| | | sequence | CTTGAGTGGATGGGCATAATCAAACCTAGAGGTGGTGACACAAT |
| | | | CTACGCACAGAACTTCCAGGGCAGAGTCACCATGACCAGGGACA |
| | | | CGTCCACGAACACAGTCTATATGGACCTGAGGAGTCTGAGATCT |
| | | | GAGGACACGGCCGTGTATTATTGTGCGAGAACTGGTGATAGGGC |
| | | | TTTTGATGTCTGGGGCCAAGGGACAATGGTCACCGTCTCTTCA |
| 1315 | YANG-2213 | VH domain | QIQLVQSGAEVKKPGASVKFSCKTSGYTFTNYYMVWVRQAPGQG |
| | | amino | LEWMGIIKPRGGDTIYAQNFQGRVTMTRDTSTNTVYMDLRSLRS |
| | | acid | EDTAVYYCARTGDRAFDVWGQGTMVTVSS |
| | | sequence | |
| 1316 | YANG-2213 | HCDR1 | GYTFTNYY |
| 1317 | YANG-2213 | HCDR2 | IKPRGGDT |
| 1318 | YANG-2213 | HCDR3 | ARTGDRAFDV |
| 1319 | YANG-2213 | VL domain | CAGTCTGTGTTGACGCAGCCGCCCTCAGTGTCTGCGGCCCCAGG |
| | | nucleic | ACAGAAGGTCACCATCTCCTGCTCTGGAAGCAGCTCCAACATTG |
| | | acid | GGAATAATTTTGTATCCTGGTACGAGCAGTTCCCAGGAACAGCC |
| | | sequence | CCCAAACTCCTCATTTATGACAATAATAAGCGACCCTCAGGGAT |
| | | | TCCTGACCGATTCTCTGGCTCCAAGTCTGGCACGTCAGCCACCC |
| | | | TGGGCATCACCGGACTCCAGACTGGGGACGAGGCCGATTATTAC |
| | | | TGCGGAACATGGGATAGCAGCCTGGGTGCTGGGGTGTTCGGCGG |
| | | | AGGGACCAAGCTGACCGTCCTA |
| 1320 | YANG-2213 | VL domain | QSVLTQPPSVSAAPGQKVTISCSGSSSNIGNNFVSWYEQFPGTA |
| | | amino | PKLLIYDNNKRPSGIPDRFSGSKSGTSATLGITGLQTGDEADYY |
| | | acid | CGTWDSSLGAGVFGGGTKLTVL |
| | | sequence | |
| 1321 | YANG-2213 | LCDR1 | SSNIGNNF |
| 1322 | YANG-2213 | LCDR2 | DNN |
| 1323 | YANG-2213 | LCDR3 | GTWDSSLGAGV |
| 1324 | YANG-2214 | VH domain | CAGATACAACTGGTGCAGTCTGGGGCTGAGGTGAAGAAGCCTGG |
| | | nucleic | GGCCTCAGTGAGGTTTTCCTGCAAGACATCTGGATACACCTTCA |
| | | acid | CCAACTACTATATGGTCTGGGTGCGACAGGCCCCTGGACAAGGA |
| | | sequence | CTTGAGTGGATGGGCATCATCAAACCTAGTGGTGGTAACACCAT |
| | | | CTACGCACAGAACTTCCAGGGCAGAGTCTCCATGACCAGGGACA |
| | | | CGTCCACGAGCACAGTCTACATGGACCTGAGGAGTCTGACATCT |
| | | | GAGGACACGGCCGTGTATTATTGTGCGAGAACTGGTGATAGGGC |
| | | | TTTTGATGTCTGGGGCCAAGGGACAATGGTCACCGTCTCTTCA |
| 1325 | YANG-2214 | VH domain | QIQLVQSGAEVKKPGASVRFSCKTSGYTFTNYYMVWVRQAPGQG |
| | | amino | LEWMGIIKPSGGNTIYAQNFQGRVSMTRDTSTSTVYMDLRSLTS |
| | | acid | EDTAVYYCARTGDRAFDVWGQGTMVTVSS |
| | | sequence | |
| 1326 | YANG-2214 | HCDR1 | GYTFTNYY |
| 1327 | YANG-2214 | HCDR2 | IKPSGGNT |
| 1328 | YANG-2214 | HCDR3 | ARTGDRAFDV |
| 1329 | YANG-2214 | VL domain | CAGTCTGTGTTGACGCAGCCGCCCTCAGTGTCTGCGGCCCCAGG |
| | | nucleic | ACAGAAGGTCACCATCTCCTGCTCTGGAAGCAGCTCCAACATTG |
| | | acid | GGAATAATTTTGTATCCTGGTACCAGCAGTTTCCAGGAACAGCC |
| | | sequence | CCCAAACTCCTCATTTATGACAATAATAAGCGACCCTCAGGGAT |
| | | | TCCTGACCGATTCTCTGGCTCCAAGTCTGGCACGTCAGCCACCC |
| | | | TGGGCATCACCGGACTCCAGACTGGGGACGAGGCCGATTATTAC |
| | | | TGCGGAACATGGGATAGCAGCCTGGGTGCTGGGGTGTTCGGCGG |
| | | | AGGGACCAAGCTGACCGTCCTA |
| 1330 | YANG-2214 | VL domain | QSVLTQPPSVSAAPGQKVTISCSGSSSNIGNNFVSWYQQFPGTA |
| | | amino | PKLLIYDNNKRPSGIPDRFSGSKSGTSATLGITGLQTGDEADYY |
| | | acid | CGTWDSSLGAGVFGGGTKLTVL |
| | | sequence | |
| 1331 | YANG-2214 | LCDR1 | SSNIGNNF |
| 1332 | YANG-2214 | LCDR2 | DNN |
| 1333 | YANG-2214 | LCDR3 | GTWDSSLGAGV |
| 1334 | YANG-2215 | VH domain | CAGATACAGTTGGTGCAGTCTGGGCCTGAGGTGAAGAAGCCTGG |
| | | nucleic | GGCCTCAGTGAAGATTTCCTGCAAGACATCTGGATACACCTTCA |
| | | acid | CCAACTACTATATGGTCTGGGTGCGACAGGCCCCTGGACAAGGA |
| | | sequence | CTTGAGTGGATGGGCATAATCAAACCTAGTGGTGGTAACACGAT |
| | | | CTACGCACAGAAGTTCCAGGGCAGAGTCACCATGACCAGGGACA |
| | | | CGTCCACGAACACAGTCTATTTGGACCTGAGCAGTCTGAGATCT |
| | | | GAGGACACGGCCGTGTATTATTGTGCGAGAACTGGGGATAGGGC |
| | | | TTTTGATGTCTGGGGCCACGGGACAATGGTCACCGTCTCTTCA |
| 1335 | YANG-2215 | VH domain | QIQLVQSGPEVKKPGASVKISCKTSGYTFTNYYMVWVRQAPGQG |
| | | amino | LEWMGIIKPSGGNTIYAQKFQGRVTMTRDTSTNTVYLDLSSLRS |
| | | acid | EDTAVYYCARTGDRAFDVWGHGTMVTVSS |
| | | sequence | |
| 1336 | YANG-2215 | HCDR1 | GYTFTNYY |
| 1337 | YANG-2215 | HCDR2 | IKPSGGNT |
| 1338 | YANG-2215 | HCDR3 | ARTGDRAFDV |
| 1339 | YANG-2215 | VL domain | CAGTCTGTGTTGACGCAGCCGCCCTCAGTGTCTGCGGCCCCAGG |
| | | nucleic | ACAGAAGGTCACCATCTCCTGCTCTGGAAGCAGCTCCAACATTG |
| | | acid | GGAATAATTATGTTTCCTGGTACCAGAAGTTCCCAGGAACAGCC |
| | | sequence | CCCAAACTCCTCATTTATGACAATAATAAGCGACCCTCAGGGAT |
| | | | TCCTGACCGATTCTCTGGCTCCAAGTCTGGCACGTCAGCCACCC |
| | | | TGGGCATCACCGGACTCCAGACTGGGGACGAGGCCGATTATTAC |
| | | | TGCGGAACATGGGATAGCAGCCTGGGTGCTGGGGTGTTCGGCGG |
| | | | AGGGACCAAGCTGACCGTCCTA |
| 1340 | YANG-2215 | VL domain | QSVLTQPPSVSAAPGQKVTISCSGSSSNIGNNYVSWYQKFPGTA |
| | | amino | PKLLIYDNNKRPSGIPDRFSGSKSGTSATLGITGLQTGDEADYY |
| | | acid | CGTWDSSLGAGVFGGGTKLTVL |
| | | sequence | |
| 1341 | YANG-2215 | LCDR1 | SSNIGNNY |
| 1342 | YANG-2215 | LCDR2 | DNN |
| 1343 | YANG-2215 | LCDR3 | GTWDSSLGAGV |
| 1344 | YANG-2216 | VH domain | CAGATTCAGTTGGTGCAGTCTGGGGCTGAGGTGAAGAAGCCTGG |
| | | nucleic | GGCCTCAGTGAAGCTTTCCTGCAAGACATCTGGATACACCTTCA |
| | | acid | CCAGCTACTACATGGTCTGGGTGCGACAGGCCCCTGGACAAGGA |
| | | sequence | CTTGAGTGGATGGGCATAATCAAACCTAGTGGTGGTAACACACT |
| | | | CTTCGAACAGAAGTTTCAGGGTAGAGTCATCATGACCAGGGACA |
| | | | CGTCCACGAACACAGTCTACATGGACCTGAACAGTCTGAGATCT |
| | | | GAGGACACGGCCGTCTATTATTGTGCGAGAACTGGAGATAGGGC |
| | | | TTTTGATGTCTGGGGCCACGGGACAATGGTCACCGTGTCTTCA |
| 1345 | YANG-2216 | VH domain | QIQLVQSGAEVKKPGASVKLSCKTSGYTFTSYYMVWVRQAPGQG |
| | | amino | LEWMGIIKPSGGNTLFEQKFQGRVIMTRDTSTNTVYMDLNSLRS |
| | | acid | EDTAVYYCARTGDRAFDVWGHGTMVTVSS |
| | | sequence | |
| 1346 | YANG-2216 | HCDR1 | GYTFTSYY |
| 1347 | YANG-2216 | HCDR2 | IKPSGGNT |
| 1348 | YANG-2216 | HCDR3 | ARTGDRAFDV |
| 1349 | YANG-2216 | VL domain | CAGTCTGTGTTGACGCAGCCGCCCTCAGTGTCTGCGGCCCCAGG |
| | | nucleic | ACAGAAGGTCACCATCTCCTGCTCTGGAAGCAGCTCCAACATTG |
| | | acid | GGAATAATTATGTATCCTGGTACCAGCAGTTCCCAGGAACAGCC |
| | | sequence | CCCAAACTCCTCATTTATGACAATAATAAGCGACCCTCAGGGAT |
| | | | TCCTGACCGATTCTCTGGCTCCAAGTCTGGCACGTCAGCCACCC |
| | | | TGGGCATCACCGGACTCCAGACTGGGGACGAGGCCGATTATTAC |
| | | | TGCGGAACATGGGATAGCAGCCTGGGTGCTGGGGTGTTCGGCGG |
| | | | AGGGACCAAGCTGACCGTCCTA |
| 1350 | YANG-2216 | VL domain | QSVLTQPPSVSAAPGQKVTISCSGSSSNIGNNYVSWYQQFPGTA |
| | | amino | PKLLIYDNNKRPSGIPDRFSGSKSGTSATLGITGLQTGDEADYY |
| | | acid | CGTWDSSLGAGVFGGGTKLTVL |
| | | sequence | |
| 1351 | YANG-2216 | LCDR1 | SSNIGNNY |
| 1352 | YANG-2216 | LCDR2 | DNN |
| 1353 | YANG-2216 | LCDR3 | GTWDSSLGAGV |
| 1354 | YANG-2217 | VH domain | CAGATGCAATTGGTGCAGTCTGGGGCTGAGGTGAAGAAGCCTGG |
| | | nucleic | GGCCTCAGTGAAGATTTCCTGCAAGACATCTGGATACACCTTCA |
| | | acid | CCAACTACTATATGGTCTGGGTGCGACAGGCCCCTGGACAAGGA |
| | | sequence | CTTGAGTGGATGGGCATAATCAAACCTAGTGGTGGTAACACGAT |
| | | | CTACGCACAGAAGTTCCAGGGCAGAGTCACCGTGACCAGGGACA |
| | | | CGTCCACGAACACAGTCTATTTGGACCTGAGCAGTCTTACATCT |
| | | | GAAGACACGGCCGTATATTATTGTGCGAGAACTGGGGATAGGGC |
| | | | TTTTGATGTCTGGGGCCATGGGACACTGGTCACCGTCTCTTCA |
| 1355 | YANG-2217 | VH domain | QMQLVQSGAEVKKPGASVKISCKTSGYTFTNYYMVWVRQAPGQG |
| | | amino | LEWMGIIKPSGGNTIYAQKFQGRVTVTRDTSTNTVYLDLSSLTS |
| | | acid | EDTAVYYCARTGDRAFDVWGHGTLVTVSS |
| | | sequence | |
| 1356 | YANG-2217 | HCDR1 | GYTFTNYY |
| 1357 | YANG-2217 | HCDR2 | IKPSGGNT |
| 1358 | YANG-2217 | HCDR3 | ARTGDRAFDV |
| 1359 | YANG-2217 | VL domain | CAGTCTGTGTTGACGCAGCCGCCCTCAGTGTCTGCGGCCCCAGG |
| | | nucleic | ACAGAAGGTCACCATCTCCTGCTCTGGAAGAAGTTCCAACATTG |
| | | acid | GGAATAATTATGTTTCCTGGTACCAGCAGTTCCCAGGAACAGCC |
| | | sequence | CCCAAACTCCTCATTTATGACAATAATAAGCGACCCTCAGGGAT |
| | | | TCCTGACCGATTCTCTGGCTCCAAGTCTGGCACGTCAGCCACCC |
| | | | TGGGCATCACCGGACTCCAGACTGGGGACGAGGCCGATTATTAC |
| | | | TGCGGAACATGGGATAGCAGCCTGGGTGCTGGGGTGTTCGGCGG |
| | | | AGGGACCAAACTGACCGTCCTA |
| 1360 | YANG-2217 | VL domain | QSVLTQPPSVSAAPGQKVTISCSGRSSNIGNNYVSWYQQFPGTA |
| | | amino | PKLLIYDNNKRPSGIPDRFSGSKSGTSATLGITGLQTGDEADYY |
| | | acid | CGTWDSSLGAGVFGGGTKLTVL |
| | | sequence | |
| 1361 | YANG-2217 | LCDR1 | SSNIGNNY |
| 1362 | YANG-2217 | LCDR2 | DNN |
| 1363 | YANG-2217 | LCDR3 | GTWDSSLGAGV |
| 1364 | YANG-2218 | VH domain | CAGATTCAGTTGGTGCAGTCTGGGGCTGAGGTGAAGAAGCCTGG |
| | | nucleic | GGCCTCAGTGAAGTTTTCCTGCAAGACATCTGGATACACCTTCA |
| | | acid | CCAGCTACTATATGGTCTGGGTGCGACAGGCCCCTGGACAAGGA |
| | | sequence | CTTGAGTGGATGGGCATAATCAAACCTAGTGGTGGTAACACAAT |
| | | | CTACGCACAGAAGTTCCAGGGCAGAGTCACCATGACCAGGGACA |
| | | | CGTCCACGAACACAGTCTACATGGACCTGAGCAGTCTGAGATCT |
| | | | GAGGACACGGCCGTGTATTATTGTGCGAGATCTGGGGATAGGGC |
| | | | TTTTGATGTCTGGGGCCACGGGACAATGATCACCGTCTCTTCA |
| 1365 | YANG-2218 | VH domain | QIQLVQSGAEVKKPGASVKFSCKTSGYTFTSYYMVWVRQAPGQG |
| | | amino | LEWMGIIKPSGGNTIYAQKFQGRVTMTRDTSTNTVYMDLSSLRS |
| | | acid | EDTAVYYCARSGDRAFDVWGHGTMITVSS |
| | | sequence | |
| 1366 | YANG-2218 | HCDR1 | GYTFTSYY |
| 1367 | YANG-2218 | HCDR2 | IKPSGGNT |
| 1368 | YANG-2218 | HCDR3 | ARSGDRAFDV |
| 1369 | YANG-2218 | VL domain | CAGTCTGTATTGACGCAGCCGCCCTCAGTGTCTGCGGCCCCAGG |
| | | nucleic | ACAGAAGGTCACCATCTCCTGCTCTGGAAGCAGCTCCAACATTG |
| | | acid | GGAATAATTTTGTGTCCTGGTACCAACAGTTCCCAGGAACAGCC |
| | | sequence | CCCAAACTCCTCATTTATGACAATAATAAGCGACCCTCAGGGAT |
| | | | TCCTGACCGCTTCTCTGGCTCCAAGTCTGGCACGTCAGCCACCC |
| | | | TGGGCATCACCGGACTCCAGACTGGGGACGAGGCCGATTATTAC |
| | | | TGCGGAACATGGGATAGCAGCCTGGGTGCTGGGGTGTTCGGCGG |
| | | | AGGGACCAAGCTGACCGTCCTA |
| 1370 | YANG-2218 | VL domain | QSVLTQPPSVSAAPGQKVTISCSGSSSNIGNNFVSWYQQFPGTA |
| | | amino | PKLLIYDNNKRPSGIPDRFSGSKSGTSATLGITGLQTGDEADYY |
| | | acid | CGTWDSSLGAGVFGGGTKLTVL |
| | | sequence | |
| 1371 | YANG-2218 | LCDR1 | SSNIGNNF |
| 1372 | YANG-2218 | LCDR2 | DNN |
| 1373 | YANG-2218 | LCDR3 | GTWDSSLGAGV |
| 1374 | YANG-2219 | VH domain | CAGATGCAATTGGTGCAATCTGGGGCTGAGGTGAAGAAGCCTGG |
| | | nucleic | GGCCTCAGTGAAGATTTCCTGCAAGACATCTGGATACACCTTCA |
| | | acid | CCAACTACTATATGGTCTGGGTGCGACAGGCCCCTGGACAAGGA |
| | | sequence | CTTGAGTGGATGGGCATAATCAAACCTAGTGGTGGTAACACGAT |
| | | | CTACGCACACAAGTTTCAGGGCAGAGTCACCATGACCAGGGACA |
| | | | CGTCCACGAACACAGTCTATTTGGACCTGAGCAGTCTGAGATCT |
| | | | GAGGACACGGCCGTCTATTATTGTGCCAGAACTGGGGATAGGGC |
| | | | TTTTGATGTCTGGGGCCACGGGACAATGGTCACCGTCTCTTCA |
| 1375 | YANG-2219 | VH domain | QMQLVQSGAEVKKPGASVKISCKTSGYTFTNYYMVWVRQAPGQG |
| | | amino | LEWMGIIKPSGGNTIYAHKFQGRVTMTRDTSTNTVYLDLSSLRS |
| | | acid | EDTAVYYCARTGDRAFDVWGHGTMVTVSS |
| | | sequence | |
| 1376 | YANG-2219 | HCDR1 | GYTFTNYY |
| 1377 | YANG-2219 | HCDR2 | IKPSGGNT |
| 1378 | YANG-2219 | HCDR3 | ARTGDRAFDV |
| 1379 | YANG-2219 | VL domain | CAGTCTGTGTTGACGCAGCCGCCCTCAGTGTCTGCGGCCCCAGG |
| | | nucleic | ACAGAAGGTCACCATCTCCTGCTCTGGAAGCAGCTCCAACATTG |
| | | acid | GGAATAATTTTGTTTCCTGGTACCAGCAGTTCCCAGGAACAGCC |
| | | sequence | CCCAAACTCCTCATTTATGACAATAATAAACGACCCTCAGGGAT |
| | | | TCCTGACCGATTCTCTGGCTCCAAGTCTGGCACGTCAGCCACCC |
| | | | TGGGCATCACCGGACTCCAGACTGGGGACGAGGCCGATTATTAC |
| | | | TGCGGAACATGGGATAGCAGCCTGGGTGCTGGGGTGTTCGGCGG |
| | | | AGGGACCAAGCTGACCGTCCTA |
| 1380 | YANG-2219 | VL domain | QSVLTQPPSVSAAPGQKVTISCSGSSSNIGNNFVSWYQQFPGTA |
| | | amino | PKLLIYDNNKRPSGIPDRFSGSKSGTSATLGITGLQTGDEADYY |
| | | acid | CGTWDSSLGAGVFGGGTKLTVL |
| | | sequence | |
| 1381 | YANG-2219 | LCDR1 | SSNIGNNE |
| 1382 | YANG-2219 | LCDR2 | DNN |
| 1383 | YANG-2219 | LCDR3 | GTWDSSLGAGV |
| 1384 | YANG-2220 | VH domain | CAGATACAACTGGTGCAGTCTGGGGCTGAGGTGAAGAAGCCTGG |
| | | nucleic | GGCCTCAGTGAAGTTTTCCTGCAAGACATCTGGATACACCTTCA |
| | | acid | CCAACTACTATATGGTCTGGGTGCGACAGGCCCCTGGACAAGGA |
| | | sequence | CTTGAGTGGATGGGCATAATCAAACCTAGTGGTGGTAACACAAT |
| | | | CTACGCACAGAACTTCCAGGACAGAGTCACCATGACCAGGGACA |
| | | | CGTCCACGAATACAGTCTACATGGACCTGAGGAGTCTGAGATCT |
| | | | GAGGACACGGCCGTGTATTATTGTGCGAGAACTGGTGATAGGGC |
| | | | TTTTGATGTCTGGGGCCATGGGACAATGGTCACCGTCTCTTCA |
| 1385 | YANG-2220 | VH domain | QIQLVQSGAEVKKPGASVKFSCKTSGYTFTNYYMVWVRQAPGQG |
| | | amino | LEWMGIIKPSGGNTIYAQNFQDRVTMTRDTSTNTVYMDLRSLRS |
| | | acid | EDTAVYYCARTGDRAFDVWGHGTMVTVSS |
| | | sequence | |
| 1386 | YANG-2220 | HCDR1 | GYTFTNYY |
| 1387 | YANG-2220 | HCDR2 | IKPSGGNT |
| 1388 | YANG-2220 | HCDR3 | ARTGDRAFDV |
| 1389 | YANG-2220 | VL domain | CAGTCTGTGTTGACGCAGCCGCCCTCAGTGTCTGCGGCCCCAGG |
| | | nucleic | ACAGAAGGTCACCATCTCCTGCTCTGGAAGCAGCTCCAACATTG |
| | | acid | GAAATAATTTTGTATCCTGGTACCAGCAGTTCCCAGGAACAGCC |
| | | sequence | CCCAAACTCCTCATTTATGACAATAATAAGCGACCCTCAGGGAT |
| | | | TCCTGACCGATTCTCTGGCTCCAAGTCTGGCACGTCAGCCACCC |
| | | | TGGGCATCACCGGACTCCAGACTGGGGACGAGGCCGATTATTAC |
| | | | TGCGGAACATGGGATAGCAGCCTGGGTGCTGGGGTGTTCGGCGG |
| | | | AGGGACCAAGCTGACCGTCCTA |
| 1390 | YANG-2220 | VL domain | QSVLTQPPSVSAAPGQKVTISCSGSSSNIGNNFVSWYQQFPGTA |
| | | amino | PKLLIYDNNKRPSGIPDRFSGSKSGTSATLGITGLQTGDEADYY |
| | | acid | CGTWDSSLGAGVFGGGTKLTVL |
| | | sequence | |
| 1391 | YANG-2220 | LCDR1 | SSNIGNNF |
| 1392 | YANG-2220 | LCDR2 | DNN |
| 1393 | YANG-2220 | LCDR3 | GTWDSSLGAGV |
| 1394 | YANG-2221 | VH domain | CAGATGCAATTGCTGCAGTCTGGGGCTGAGGTGAAGAAGCCTGG |
| | | nucleic | GGCCTCAGTGAAGATTTCCTGCAAGACATCTGGATACACCTTCA |
| | | acid | CCAACTACTATATGGTCTGGGTGCGACAGGCCCCTGGACAAGGA |
| | | sequence | CTTGAGTGGATGGGCATAATCAAACCTAGTGGTGGTAACACGAT |
| | | | CTACGCACAGAAGTTCCAGGGCAGAGTCACCATGACCAGGGACA |
| | | | CGTCCACGAACACAGTCTATTTGGACCTGAGCAGTCTGAGATCT |
| | | | GAGGACACGGCCGTGTATTATTGTGCGAGAACTGGGGATAGGGC |
| | | | TTTTGATGTCTGGGGCCACGGGACAATAGTCACCGTCTCTTCA |
| 1395 | YANG-2221 | VH domain | QMQLLQSGAEVKKPGASVKISCKTSGYTFTNYYMVWVRQAPGQG |
| | | amino | LEWMGIIKPSGGNTIYAQKFQGRVTMTRDTSTNTVYLDLSSLRS |
| | | acid | EDTAVYYCARTGDRAFDVWGHGTIVTVSS |
| | | sequence | |
| 1396 | YANG-2221 | HCDR1 | GYTFTNYY |
| 1397 | YANG-2221 | HCDR2 | IKPSGGNT |
| 1398 | YANG-2221 | HCDR3 | ARTGDRAFDV |
| 1399 | YANG-2221 | VL domain | CAGTCTGTGTTGACGCAGCCGCCCTCAGTGTCTGCGGCCCCAGG |
| | | nucleic | ACAGAAGGTCACCATCTCCTGCTCTGGAAACAGCTCCAACATTG |
| | | acid | GGAATAATTATGTTTCCTGGTATCAGCAGTTCCCAGGAACAGCC |
| | | sequence | CCCAAACTCCTCATTTATGACAATAATAAGCGACCCTCAGGGAT |
| | | | TCCTGACCGATTCTCTGGCTCCAAGTCTGGCACGTCAGCCACCC |
| | | | TGGGCATCACCGGACTCCAGACTGGGGACGAGGCCGATTATTAT |
| | | | TGCGGAACATGGGATAGCAGCCTGGGTGCTGGGGTGTTCGGCGG |
| | | | AGGGACCAAGCTGACCGTCCTA |
| 1400 | YANG-2221 | VL domain | QSVLTQPPSVSAAPGQKVTISCSGNSSNIGNNYVSWYQQFPGTA |
| | | amino | PKLLIYDNNKRPSGIPDRFSGSKSGTSATLGITGLQTGDEADYY |
| | | acid | CGTWDSSLGAGVFGGGTKLTVL |
| | | sequence | |
| 1401 | YANG-2221 | LCDR1 | SSNIGNNY |
| 1402 | YANG-2221 | LCDR2 | DNN |
| 1403 | YANG-2221 | LCDR3 | GTWDSSLGAGV |
| 1404 | YANG-2222 | VH domain | CAGATACAGCTGGTGCAGTCTGGGGCTGAGGTGAAGAAGCCTGG |
| | | nucleic | GGCCTCAGTGAAGTTTTCCTGCAAGACATCTGGATACACCTTCA |
| | | acid | CCAACTACTATATGGTCTGGGTGCGACAGGCCCCTGGACAAGGA |
| | | sequence | CTTGAGTGGATGGGCATAATCAAACCTAGTGGTGGTAACACAAT |
| | | | CTACGCACAGAATTTCCAGGGCAGAGTCACCATGACCAGGGACA |
| | | | CGTCCACGAACACAGTCTACATGGACCTGAGGAGTCTGAGATCT |
| | | | GAGGACACGGCCGTGTATTATTGTGCGAGAACTGGTGATAGGGC |
| | | | TTTTGATGTCTGGGGCCAAGGGACAATGGTCACCGTCTCTTCA |
| 1405 | YANG-2222 | VH domain | QIQLVQSGAEVKKPGASVKFSCKTSGYTFTNYYMVWVRQAPGQG |
| | | amino | LEWMGIIKPSGGNTIYAQNFQGRVTMTRDTSTNTVYMDLRSLRS |
| | | acid | EDTAVYYCARTGDRAFDVWGQGTMVTVSS |
| | | sequence | |
| 1406 | YANG-2222 | HCDR1 | GYTFTNYY |
| 1407 | YANG-2222 | HCDR2 | IKPSGGNT |
| 1408 | YANG-2222 | HCDR3 | ARTGDRAFDV |
| 1409 | YANG-2222 | VL domain | CAGTCTGTGTTGACGCAGCCGCCCTCAGTATCTGCGACCCCAGG |
| | | nucleic | ACAGAAGGTCACCATCTCCTGCTCTGGAAGCAGCTCCAACATTG |
| | | acid | GGAATAATTTTGTATCCTGGTACCAGCAGTTCCCAGGAACAGCC |
| | | sequence | CCCAAACTCCTCATTTATGACAATAATAAGCGACCCTCAGGGAT |
| | | | TCCTGACCGATTCTCTGGCTCCAAGTCTGGCACGTCAGCCACCC |
| | | | TGGGCATCACCGGACTCCAGACTGGGGACGAGGCCGATTATTAC |
| | | | TGCGGAACATGGGATAGCAGCCTGGGTGCTGGGGTGTTCGGCGG |
| | | | AGGGACCAAGCTGACCGTCCTA |
| 1410 | YANG-2222 | VL domain | QSVLTQPPSVSATPGQKVTISCSGSSSNIGNNFVSWYQQFPGTA |
| | | amino | PKLLIYDNNKRPSGIPDRFSGSKSGTSATLGITGLQTGDEADYY |
| | | acid | CGTWDSSLGAGVFGGGTKLTVL |
| | | sequence | |
| 1411 | YANG-2222 | LCDR1 | SSNIGNNF |
| 1412 | YANG-2222 | LCDR2 | DNN |
| 1413 | YANG-2222 | LCDR3 | GTWDSSLGAGV |
| 1414 | YANG-2223 | VH domain | CAGATGCAGCTGGTACAGTCTGGGGCTGAGGTGAAGAAGCCTGG |
| | | nucleic | GGCCTCAGTGAAGATTTCCTGCAAGACATCTGGATACACCTTCA |
| | | acid | CCAGCTACTATATGGTCTGGGTGCGACAGGCCCCTGGACAAGGA |
| | | sequence | CTTGAGTGGATGGGCATAATCAAACCTAGTGGTGGTAACACAAT |
| | | | CTATGCACAGAAGTTCCAGGGCAGAGTCACCATGACCAGGGACA |
| | | | CGTCCACGAACACAGTCTACATGGACCTGAGTAGTCTGAGATCT |
| | | | GAGGACACGGCCGTGTATTATTGTGCGAGAACTGGGGATAGGGC |
| | | | TTTTGATGTCTGGGGCCAAGGGACAATGGTCACCGTCTCTTCA |
| 1415 | YANG-2223 | VH domain | QMQLVQSGAEVKKPGASVKISCKTSGYTFTSYYMVWVRQAPGQG |
| | | amino | LEWMGIIKPSGGNTIYAQKFQGRVTMTRDTSTNTVYMDLSSLRS |
| | | acid | EDTAVYYCARTGDRAFDVWGQGTMVTVSS |
| | | sequence | |
| 1416 | YANG-2223 | HCDR1 | GYTFTSYY |
| 1417 | YANG-2223 | HCDR2 | IKPSGGNT |
| 1418 | YANG-2223 | HCDR3 | ARTGDRAFDV |
| 1419 | YANG-2223 | VL domain | CAGTCTGTGTTGACGCAGCCGCCCTCAGTGTCTGCGGCCCCAGG |
| | | nucleic | ACAGAAGGTCACCATCTCCTGCTCTGGAAGTACCTCCAACATTG |
| | | acid | GGAGTAATTATGTCTCCTGGTACCAGCAGCTCCCAGGAACAGCC |
| | | sequence | CCCAAACTCCTCATTTATGACAATAGTAAGCGCCCCTCAGGGAT |
| | | | TCCTGACCGATTCTCTGGCTCCAAGTCTGGCACGTCAGCCACCC |
| | | | TGGGCATCACCGGACTCCAGACTGGGGACGAGGCCGATTATTAC |
| | | | TGCGGAACATGGGATAGCAGCCTGGGTGCTGGGGTGTTCGGCGG |
| | | | AGGGACCAAACTGACCGTCCTA |
| 1420 | YANG-2223 | VL domain | QSVLTQPPSVSAAPGQKVTISCSGSTSNIGSNYVSWYQQLPGTA |
| | | amino | PKLLIYDNSKRPSGIPDRFSGSKSGTSATLGITGLQTGDEADYY |
| | | acid | CGTWDSSLGAGVFGGGTKLTVL |
| | | sequence | |
| 1421 | YANG-2223 | LCDR1 | TSNIGSNY |
| 1422 | YANG-2223 | LCDR2 | DNS |
| 1423 | YANG-2223 | LCDR3 | GTWDSSLGAGV |
| 1424 | YANG-2224 | VH domain | CAGATACAGCTGGTGCAGTCTGGGGCTGAGGTGAAGAAGCCTGG |
| | | nucleic | GGCCTCAGTGAAGTTTTCCTGCAAGACATCTGGATACACCTTCA |
| | | acid | CCAACTACTATATGGTCTGGGTGCGACAGGCCCCTGGACAAGGA |
| | | sequence | CTTGAGTGGATGGGCATAATCAAACCTAGTGGTGGTAACACAAT |
| | | | CTACGCACAGAACTTCCAGGGCAGAGTCACCATGACCAGGGACA |
| | | | CGTCCACGAACACAGTCTACATGGACCTGAGGAGTCTGAGATCT |
| | | | GAGGACACGGCCGTGTATTATTGTGCGAGAACTGGTGATAGGGC |
| | | | TTTTGATGTCTGGGGCCAAGGGACAATGGTCACCGTCTCTTCA |
| 1425 | YANG-2224 | VH domain | QIQLVQSGAEVKKPGASVKFSCKTSGYTFTNYYMVWVRQAPGQG |
| | | amino | LEWMGIIKPSGGNTIYAQNFQGRVTMTRDTSINTVYMDLRSLRS |
| | | acid | EDTAVYYCARTGDRAFDVWGQGTMVTVSS |
| | | sequence | |
| 1426 | YANG-2224 | HCDR1 | GYTFTNYY |
| 1427 | YANG-2224 | HCDR2 | IKPSGGNT |
| 1428 | YANG-2224 | HCDR3 | ARTGDRAFDV |
| 1429 | YANG-2224 | VL domain | CAGTCTGTGTTGACGCAGCCGCCCTCAGTGTCTGCGGCCCCAGG |
| | | nucleic | ACAGAAGGTCACCATCTCCTGCTCTGGAAGCAGCTCCAACATTG |
| | | acid | GGAATAATTTTGTATCCTGGTACCAGCAGTTCCCAGGAACAGCC |
| | | sequence | CCCAAACTCCTCATTTATGACAATAATAAGCGACCCTCAGGGAT |
| | | | TCCTGACCGATTCTCTGGCTCCAAGTCTGGCACGTCAGCCACCC |
| | | | TGGGCATCACCGGACTCCAGACTGGGGACGAGGCCGATTATTAC |
| | | | TGCGGAACATGGGATAGCAGTTTGGGTGCTGGGGTGTTCGGCGG |
| | | | AGGGACCAAACTGACCGTCCTA |
| 1430 | YANG-2224 | VL domain | QSVLTQPPSVSAAPGQKVTISCSGSSSNIGNNFVSWYQQFPGTA |
| | | amino | PKLLIYDNNKRPSGIPDRFSGSKSGTSATLGITGLQTGDEADYY |
| | | acid | CGTWDSSLGAGVFGGGTKLTVL |
| | | sequence | |
| 1431 | YANG-2224 | LCDR1 | SSNIGNNF |
| 1432 | YANG-2224 | LCDR2 | DNN |
| 1433 | YANG-2224 | LCDR3 | GTWDSSLGAGV |
| 1434 | YANG-2225 | VH domain | CAGATTCAGTTAGTGCAGTCTGGGGCTGAGGTGAAGAAGCCTGG |
| | | nucleic | GGCCTCAGTGAAGCTTTCCTGCAAGACATCTGGATACACCTTCA |
| | | acid | CCAGCTACTATATGGTCTGGGTGCGACAGGCCCCTGGACAAGGA |
| | | sequence | CTTGAGTGGATGGGCATAATCAAACCTAGTGGTGGTAACACAAT |
| | | | CTACGCACAGAAGTTCCAGGGCAGAGTCACCATGACCAGGGACA |
| | | | CGTCCACGAACACAGTCTACATGGACCTGAACAGTCTGAGATCT |
| | | | GAGGACACGGCCGTCTATTATTGTGCGAGAACTGGAGATAGGGC |
| | | | TTTTGATGTCTGGGGCCACGGGACAATGGTCACCGTGTCTTCA |
| 1435 | YANG-2225 | VH domain | QIQLVQSGAEVKKPGASVKLSCKTSGYTFTSYYMVWVRQAPGQG |
| | | amino | LEWMGIIKPSGGNTIYAQKFQGRVTMTRDTSTNTVYMDLNSLRS |
| | | acid | EDTAVYYCARTGDRAFDVWGHGTMVTVSS |
| | | sequence | |
| 1436 | YANG-2225 | HCDR1 | GYTFTSYY |
| 1437 | YANG-2225 | HCDR2 | IKPSGGNT |
| 1438 | YANG-2225 | HCDR3 | ARTGDRAFDV |
| 1439 | YANG-2225 | VL domain | CAGTCTGTGTTGACGCAGCCGCCCTCAGTGTCTGCGGCCCCAGG |
| | | nucleic | ACAGAAGGTCACCATCTCCTGCTCTGGAAGCAGCTCCAATATTG |
| | | acid | GGAATAATTATGTATCCTGGTACCAGCAGTTCCCAGGAACAGCC |
| | | sequence | CCCAAACTCTTCATTTATGACAATAATAAGCGACCCTCAGGGAT |
| | | | TTCTGACCGATTCTCTGGCTCCAAGTCTGGCACGTCAGCCACCC |
| | | | TGGGCATCACCGGACTCCAGACTGGGGACGAGGCCGATTATTAC |
| | | | TGCGGAACATGGGATAGCAGCCTGGGTGCTGGGGTGTTCGGCGG |
| | | | AGGGACCAAGCTGACCGTCCTA |
| 1440 | YANG-2225 | VL domain | QSVLTQPPSVSAAPGQKVTISCSGSSSNIGNNYVSWYQQFPGTA |
| | | amino | PKLFIYDNNKRPSGISDRFSGSKSGTSATLGITGLQTGDEADYY |
| | | acid | CGTWDSSLGAGVFGGGTKLTVL |
| | | sequence | |
| 1441 | YANG-2225 | LCDR1 | SSNIGNNY |
| 1442 | YANG-2225 | LCDR2 | DNN |
| 1443 | YANG-2225 | LCDR3 | GTWDSSLGAGV |
| 1444 | YANG-2226 | VH domain | CAGATACAGCTGGTACAGTCTGGGGCTGAGGTGAAGAAGCCTGG |
| | | nucleic | GGCCTCAGTGAAGTTTTCCTGCAAGACATCTGGATACACCTTCA |
| | | acid | CCACCAACTATATGGTCTGGGTGCGACAGGCCCCTGGACAAGGA |
| | | sequence | CTTGAGTGGATGGGCATAATCAAACCTAGTGGTGGTGACACAAT |
| | | | CTACGCACAGCAATTCCAGGGCAGAGTCACCATGACCAGGGACA |
| | | | CGTCCACGAACACAGTCTACATGGACCTGACCAGTCTGACATCT |
| | | | GAGGACACGGCCGTCTATTATTGTGCGAGAACTGGGGATAGGGC |
| | | | TTTTGATGTCTGGGGCCAAGGGACAATGGTCACCGTCTCGTCA |
| 1445 | YANG-2226 | VH domain | QIQLVQSGAEVKKPGASVKFSCKTSGYTFTTNYMVWVRQAPGQG |
| | | amino | LEWMGIIKPSGGDTIYAQQFQGRVTMTRDTSTNTVYMDLTSLTS |
| | | acid | EDTAVYYCARTGDRAFDVWGQGTMVTVSS |
| | | sequence | |
| 1446 | YANG-2226 | HCDR1 | GYTFTTNY |
| 1447 | YANG-2226 | HCDR2 | IKPSGGDT |
| 1448 | YANG-2226 | HCDR3 | ARTGDRAFDV |
| 1449 | YANG-2226 | VL domain | CAGTCTGTGTTGACGCAGCCGCCCTCAGTGTCTGCGGCCCCAGG |
| | | nucleic | ACAGAAGGTCACCATCTCCTGCTCTGGAAGCAGCTCCAACATTG |
| | | acid | GGAATAATTATGTATCCTGGTACCAGCAGCTCCCAGGAACAGCC |
| | | sequence | CCCAAACTCCTCATTTATGACGATGGAAAGCGACCCTCAGGGAT |
| | | | TCCTGATCGATTCTCTGGCTCCAAGTCTGGCACGTCAGCCTCCC |
| | | | TGGGCATCACCGGACTCCAGACTGGGGACGAGGCCGATTATTAC |
| | | | TGCGGAACATGGGATACCAGCCTGGGTTCTGGGGTGTTCGGCGG |
| | | | CGGGACCAAGTTGACCGTCCTA |
| 1450 | YANG-2226 | VL domain | QSVLTQPPSVSAAPGQKVTISCSGSSSNIGNNYVSWYQQLPGTA |
| | | amino | PKLLIYDDGKRPSGIPDRFSGSKSGTSASLGITGLQTGDEADYY |
| | | acid | CGTWDTSLGSGVFGGGTKLTVL |
| | | sequence | |
| 1451 | YANG-2226 | LCDR1 | SSNIGNNY |
| 1452 | YANG-2226 | LCDR2 | DDG |
| 1453 | YANG-2226 | LCDR3 | GTWDTSLGSGV |
| 1454 | YANG-2227 | VH domain | CAGATACAACTGGTGCAGTCTGGGGCTGAGGTGAAGAAGCCTGG |
| | | nucleic | GGCCTCAGTGAAGTTTTCCTGCAAGACATCTGGATACACCTTCA |
| | | acid | CCAACTACTATATGGTCTGGGTGCGACAGGCCCCTGGACAAGGA |
| | | sequence | CTTGAGTGGATGGGCATAATCAAACCTAGTGGTGGTGACACAAT |
| | | | CTACGCACAGAACTTCCAGGGCAGAGTCACCATGACCAGGGACA |
| | | | CGTCCACGAACACAGTCTATATGGACCTGAGGAGTCTGAGATCT |
| | | | GAAGACACGGCCGTGTATTATTGTGCGAGAACTGGTGATAGGGC |
| | | | TTTTGATGTCTGGGGCCAAGGGACAATGGTCACCGTCTCTTCA |
| 1455 | YANG-2227 | VH domain | QIQLVQSGAEVKKPGASVKFSCKTSGYTFTNYYMVWVRQAPGQG |
| | | amino | LEWMGIIKPSGGDTIYAQNFQGRVTMTRDTSTNTVYMDLRSLRS |
| | | acid | EDTAVYYCARTGDRAFDVWGQGTMVTVSS |
| | | sequence | |
| 1456 | YANG-2227 | HCDR1 | GYTFTNYY |
| 1457 | YANG-2227 | HCDR2 | IKPSGGDT |
| 1458 | YANG-2227 | HCDR3 | ARTGDRAFDV |
| 1459 | YANG-2227 | VL domain | CAGTCTGTGTTGACGCAGCCGCCCTCAGTGTCTGCGGCCCCAGG |
| | | nucleic | ACAGAAGGTCACCATCTCCTGCTCTGGAAGCAGCTCCAACATTG |
| | | acid | GGAATAATTTTGTATCCTGGTACCAGCAGTTCCCAGGAACAGCC |
| | | sequence | CCCAAACTCCTCATTTATGACAATAATAAGCGACCCTCAGGGAT |
| | | | TCCTGACCGATTCTCTGGCTCCAAGTCTGGCACGTCAGCCACCC |
| | | | TGGGCATCACCGGACTCCAGACTGGGGACGAGGCCGATTATTAC |
| | | | TGCGGAACATGGGATAGCAGCCTGGGTGCTGGGGTGTTCGGCGG |
| | | | AGGGACCAAGCTGACCGTCCTA |
| 1460 | YANG-2227 | VL domain | QSVLTQPPSVSAAPGQKVTISCSGSSSNIGNNFVSWYQQFPGTA |
| | | amino | PKLLIYDNNKRPSGIPDRFSGSKSGTSATLGITGLQTGDEADYY |
| | | acid | CGTWDSSLGAGVFGGGTKLTVL |
| | | sequence | |
| 1461 | YANG-2227 | LCDR1 | SSNIGNNF |
| 1462 | YANG-2227 | LCDR2 | DNN |
| 1463 | YANG-2227 | LCDR3 | GTWDSSLGAGV |
| 1464 | YANG-2228 | VH domain | CAGATGCAATTGGTGCAATCTGGGGCTGAGGTGAAGAAGCCTGG |
| | | nucleic | GGCCTCAGTGAAGATTTCCTGCAAGACATCTGGATACACCTTCA |
| | | acid | CCAACTACTATATGGTCTGGGTGCGACAGGCCCCTGGACAAGGA |
| | | sequence | CTTGAGTGGATGGGCATAATCAAACCTAGTGGTGGTAACACGAT |
| | | | CTACGCACAGAAGTTCCAGGACAGAGTCACCATGACCAGGGACA |
| | | | CGTCCACGAACACAGTCTATTTGGACCTGAGCAGTCTGAGATCT |
| | | | GAGGACACGGCCGTCTATTATTGTGCGAGAACTGGGGATAGGGC |
| | | | TTTTGATGTCTGGGGCCACGGGACAATGGTCACCGTCTCTTCA |
| 1465 | YANG-2228 | VH domain | QMQLVQSGAEVKKPGASVKISCKTSGYTFTNYYMVWVRQAPGQG |
| | | amino | LEWMGIIKPSGGNTIYAQKFQDRVTMTRDTSTNTVYLDLSSLRS |
| | | acid | EDTAVYYCARTGDRAFDVWGHGTMVTVSS |
| | | sequence | |
| 1466 | YANG-2228 | HCDR1 | GYTFTNYY |
| 1467 | YANG-2228 | HCDR2 | IKPSGGNT |
| 1468 | YANG-2228 | HCDR3 | ARTGDRAFDV |
| 1469 | YANG-2228 | VL domain | CAGTCTGTGTTGACGCAGCCGCCCTCAGTGTCTGCGGCCCCAGG |
| | | nucleic | ACAGAAGGTCACCATCTCCTGCTCTGGAAGCAGCTCCAACATTG |
| | | acid | GGAATAATTTTGTTTCCTGGTACCAGCAGTTCCCAGGAACAGCC |
| | | sequence | CCCAAACTCCTCATTTATGTCAATAATAAGCGACCCTCAGGGAT |
| | | | TCCTGACCGATTCTCTGGCTCCAGGTCTGGCACGTCAGCCACCC |
| | | | TGGGCATCACCGGACTCCAGACTGGGGACGAGGCCGATTATTAC |
| | | | TGCGGAACATGGGATAGCAGCCTGGGTGCTGGGGTGTTCGGCGG |
| | | | AGGGACCAAACTGACCGTCCTA |
| 1470 | YANG-2228 | VL domain | QSVLTQPPSVSAAPGQKVTISCSGSSSNIGNNFVSWYQQFPGTA |
| | | amino | PKLLIYVNNKRPSGIPDRESGSRSGTSATLGITGLQTGDEADYY |
| | | acid | CGTWDSSLGAGVFGGGTKLTVL |
| | | sequence | |
| 1471 | YANG-2228 | LCDR1 | SSNIGNNF |
| 1472 | YANG-2228 | LCDR2 | VNN |
| 1473 | YANG-2228 | LCDR3 | GTWDSSLGAGV |
| 1474 | YANG-2229 | VH domain | CAGATGCAGTTGGTGCAGTCTGGGGCTGAGGTGAGGAAGCCTGG |
| | | nucleic | GGCCTCAGTGAAGATTTCCTGCAAGACATCTGGATACACCTTCA |
| | | acid | TCAACTACTATATGGTCTGGGTGCGACAGGCCCCTGGACAAGGA |
| | | sequence | CTTGAGTGGATGGGCATAATCAAACCTAGTGGTGGTTATACGAT |
| | | | CTACGCACAGAAGTTCCAGGGCAGAGTCACCATGACCAGGGACA |
| | | | CGTCCACGTACACAGTCTATATGGCCCTGAGCGGTCTGAGATCT |
| | | | GAGGACACGGCCGTGTATTATTGTGCGAGAACTGGGGATAGGGC |
| | | | TTTTGATGTCTGGGGCCACGGGACAATGGTCACCGTCTCTTCA |
| 1475 | YANG-2229 | VH domain | QMQLVQSGAEVRKPGASVKISCKTSGYTFINYYMVWVRQAPGQG |
| | | amino | LEWMGIIKPSGGYTIYAQKFQGRVTMTRDTSTYTVYMALSGLRS |
| | | acid | EDTAVYYCARTGDRAFDVWGHGTMVTVSS |
| | | sequence | |
| 1476 | YANG-2229 | HCDR1 | GYTFINYY |
| 1477 | YANG-2229 | HCDR2 | IKPSGGYT |
| 1478 | YANG-2229 | HCDR3 | ARTGDRAFDV |
| 1479 | YANG-2229 | VL domain | CAGTCTGTATTGACGCAGCCGCCCTCAGTGTCTGCGGCCCCAGG |
| | | nucleic | ACAGAAGGTCACCATCTCCTGCTCTGGAAGCAGCTCCAACATTG |
| | | acid | GGAATAATTATGTTTCCTGGTACCAGCAGTTCCCAGGAACAGCC |
| | | sequence | CCCAAACTCCTCATTTATGACAATCATAAGCGACCCTCAGGTAT |
| | | | TCCTGACCGATTCTCTGCCTCCAAGTCTGGCACGTCAGCCACCC |
| | | | TGGGCATCACCGGACTCCTGACTGGGGACGAGGCCGATTATTAC |
| | | | TGCGGAACATGGGATAGCGGCCTGGGTGCTGGGGTGTTCGGCGG |
| | | | AGGGACCAAGCTGACCGTCCTA |
| 1480 | YANG-2229 | VL domain | QSVLTQPPSVSAAPGQKVTISCSGSSSNIGNNYVSWYQQFPGTA |
| | | amino | PKLLIYDNHKRPSGIPDRESASKSGTSATLGITGLLTGDEADYY |
| | | acid | CGTWDSGLGAGVFGGGTKLTVL |
| | | sequence | |
| 1481 | YANG-2229 | LCDR1 | SSNIGNNY |
| 1482 | YANG-2229 | LCDR2 | DNH |
| 1483 | YANG-2229 | LCDR3 | GTWDSGLGAGV |
| 1484 | YANG-2230 | VH domain | CAGATTCAATTGGTGCAGTCTGGGGCTGAGGTGAAGAAGCCTGG |
| | | nucleic | GGCCTCCGTGAAGATTTCGTGCAAGCCATCTGGATACACCTTCA |
| | | acid | CCAACTACTATATGGTCTGGGTGCGACAGGCCCCTGGACAAGGA |
| | | sequence | CTTGAGTGGATGGGCATAATCAAACCTAGTGGTGGTAACACGAT |
| | | | CTACGCACAGAAGTTCCAGGGCAGAGTCACCATGACCAGGGACA |
| | | | CGTCCACGAACACAGTCTATTTGGACCTGAGCAGTCTGAGATCT |
| | | | GAGGACACGGCCGTATATTATTGTGCGAGAACTGGGGATAGGGC |
| | | | TTTTGATGTCTGGGGCCACGGGACAATGGTCACCGTCTCTTCA |
| 1485 | YANG-2230 | VH domain | QIQLVQSGAEVKKPGASVKISCKPSGYTFTNYYMVWVRQAPGQG |
| | | amino | LEWMGIIKPSGGNTIYAQKFQGRVTMTRDTSTNTVYLDLSSLRS |
| | | acid | EDTAVYYCARTGDRAFDVWGHGTMVTVSS |
| | | sequence | |
| 1486 | YANG-2230 | HCDR1 | GYTFTNYY |
| 1487 | YANG-2230 | HCDR2 | IKPSGGNT |
| 1488 | YANG-2230 | HCDR3 | ARTGDRAFDV |
| 1489 | YANG-2230 | VL domain | CAGTCTGTGTTGACGCAGACGCCCTCAGTGTCTGCGGCCCCAGG |
| | | nucleic | ACAGAAGGTCACCATCTCCTGCTCTGGAAGCAGCTCCAATATTG |
| | | acid | GGAATAATTATGTTTCCTGGTACCAGCAGTTCCCAGGAACAGTC |
| | | sequence | CCCAAACTCCTCATTTATGACAATAATAAGCGACCCTCAGGGAT |
| | | | TCCTGACCGATTCTCTGGCTCCAAGTCTGGCACGTCAGCCACCC |
| | | | TGGGCATCACCGGACTCCAGACTGGGGACGAGGCCGAATATTAC |
| | | | TGCGGAACATGGGATAGCAGCCTGGGTGCTGGGGTGTTCGGCGG |
| | | | AGGGACCAAGCTGACCGTCCTA |
| 1490 | YANG-2230 | VL domain | QSVLTQTPSVSAAPGQKVTISCSGSSSNIGNNYVSWYQQFPGTV |
| | | amino | PKLLIYDNNKRPSGIPDRFSGSKSGTSATLGITGLQTGDEAEYY |
| | | acid | CGTWDSSLGAGVFGGGTKLTVL |
| | | sequence | |
| 1491 | YANG-2230 | LCDR1 | SSNIGNNY |
| 1492 | YANG-2230 | LCDR2 | DNN |
| 1493 | YANG-2230 | LCDR3 | GTWDSSLGAGV |
| 1494 | YANG-2231 | VH domain | CAGATTCAGTTGGTGCAGTCTGGGGCTGAGGTGAAGAAGCCTGG |
| | | nucleic | GGCCTCAGTGAAGTTTTCCTGCAAGACATCTGGATACACCTTCA |
| | | acid | CCAGCTACTATATGGTCTGGGTGCGACAGGCCCCTGGACAAGGA |
| | | sequence | CTTGAGTGGATGGGCATTATCAAACCTAGTGGTGGTAACACAAT |
| | | | CTACGCACAGAAGTTCCAGGGCAGAGTCACCATGACCAGGGACA |
| | | | CGTCCACGAACACAGTCTACATGGACCTGAGCAGTCTGAGATCT |
| | | | GAGGACACGGCCGTTTATTATTGTGCGAGAACTGGGGATAGGGC |
| | | | TTTTGATGTCTGGGGCCACGGGACAATGATCACCGTCTCTTCA |
| 1495 | YANG-2231 | VH domain | QIQLVQSGAEVKKPGASVKFSCKTSGYTFTSYYMVWVRQAPGQG |
| | | amino | LEWMGIIKPSGGNTIYAQKFQGRVTMTRDTSTNTVYMDLSSLRS |
| | | acid | EDTAVYYCARTGDRAFDVWGHGTMITVSS |
| | | sequence | |
| 1496 | YANG-2231 | HCDR1 | GYTFTSYY |
| 1497 | YANG-2231 | HCDR2 | IKPSGGNT |
| 1498 | YANG-2231 | HCDR3 | ARTGDRAFDV |
| 1499 | YANG-2231 | VL domain | CAGTCTGTATTGACGCAGCCGCCCTCAGTGTCTGCGGCCCCAGG |
| | | nucleic | ACAGAAGGTCACCATCTCCTGCTCTGGAAGCAGCTCCAACATTG |
| | | acid | GGAATAATTTTGTATCCTGGTACCAACAGTTCCCAGGAACAGCC |
| | | sequence | CCCAAACTCCTCATTTATGACAATAATAAGCGACCCTCAGGGAT |
| | | | TCCTGACCGATTCTCTGGCTCCAAGTCTGGCACGTCAGCCACCC |
| | | | TGGGCATCACCGGACTCCAGACTGGGGACGAGGCCGATTATTAC |
| | | | TGCGGAACATGGGATAGCAGCCTGGGTGCTGGGGTGTTCGGCGG |
| | | | AGGGACCAAGCTGACCGTCCTA |
| 1500 | YANG-2231 | VL domain | QSVLTQPPSVSAAPGQKVTISCSGSSSNIGNNFVSWYQQFPGTA |
| | | amino | PKLLIYDNNKRPSGIPDRFSGSKSGTSATLGITGLQTGDEADYY |
| | | acid | CGTWDSSLGAGVFGGGTKLTVL |
| | | sequence | |
| 1501 | YANG-2231 | LCDR1 | SSNIGNNE |
| 1502 | YANG-2231 | LCDR2 | DNN |
| 1503 | YANG-2231 | LCDR3 | GTWDSSLGAGV |
| 1504 | YANG-2232 | VH domain | CAGATACAGCTGGTGCAGTCTGGGGCTGAGGTGAAGAAGCCTGG |
| | | nucleic | GGCCTCAGTGAAGTTTTCCTGCAAGACATCTGGATACACCTTCA |
| | | acid | CCAACTACTATATGGTCTGGGTGCGACAGGCCCCTGGACAAGGA |
| | | sequence | CTTGAGTGGATGGGCATAATCAAACCTAGTGGTGGTAACACAAT |
| | | | CTACGCACAGAATTTCCAGGGCAGAGTCACCATGACCAGGGACA |
| | | | CGTCCACGAACACAGTCTACATGGACCTGAGGAGTCTGAGATCT |
| | | | GAGGACACGGCCGTGTATTATTGTGCGAGAACTGGTGATAGGGC |
| | | | TTTTGATGTCTGGGGCCAAGGGACAATGGTCACCGTCTCTGCA |
| 1505 | YANG-2232 | VH domain | QIQLVQSGAEVKKPGASVKFSCKTSGYTFTNYYMVWVRQAPGQG |
| | | amino | LEWMGIIKPSGGNTIYAQNFQGRVTMTRDTSTNTVYMDLRSLRS |
| | | acid | EDTAVYYCARTGDRAFDVWGQGTMVTVSA |
| | | sequence | |
| 1506 | YANG-2232 | HCDR1 | GYTFTNYY |
| 1507 | YANG-2232 | HCDR2 | IKPSGGNT |
| 1508 | YANG-2232 | HCDR3 | ARTGDRAFDV |
| 1509 | YANG-2232 | VL domain | CAGTCTGTGTTGACGCAGCCGCCCTCAGTGTCTGCGGCCCCAGG |
| | | nucleic | ACAGAAGGTCACCATCTCCTGCTCTGGAAGCAGCTCCAACATTG |
| | | acid | GGAATAATTTTGTATCCTGGTACCAGCAGTTCCCAGGAACAGCC |
| | | sequence | CCCAAACTCCTCATTTATGACAATAATAAGCGACCCTCAGGGAT |
| | | | TCCTGACCGATTCTCTGGCTCCAAGTCTGGCACGTCAGCCACCC |
| | | | TGGGCATCACCGGACTCCAGACTGGGGACGAGGCCGATTATTAC |
| | | | TGCGGAACATGGGATAGCAGCCTGGGTGCTGGGGTGTTCGGCGG |
| | | | AGGGACCAAGCTGACCGTCCTA |
| 1510 | YANG-2232 | VL domain | QSVLTQPPSVSAAPGQKVTISCSGSSSNIGNNFVSWYQQFPGTA |
| | | amino | PKLLIYDNNKRPSGIPDRFSGSKSGTSATLGITGLQTGDEADYY |
| | | acid | CGTWDSSLGAGVFGGGTKLTVL |
| | | sequence | |
| 1511 | YANG-2232 | LCDR1 | SSNIGNNF |
| 1512 | YANG-2232 | LCDR2 | DNN |
| 1513 | YANG-2232 | LCDR3 | GTWDSSLGAGV |
| 1514 | YANG-2233 | VH domain | CAGATGCAACTGGTGCAGTCTGGGGCTGAGGTGAAGAAGCCTGG |
| | | nucleic | GGCCTCAGTGAAGATTTCCTGCAAGACATCTGGATACCCCTTCA |
| | | acid | CCAACTACTATATGGTCTGGGTGCGACAGGCCCCTGGACAAGGA |
| | | sequence | CTTGAGTGGATGGGCATAATCAAACCTAGTGGTGGTAACACGAT |
| | | | CTATGCACAGAAGTTCCAGGGCAGAGTCACCATGACCAGGGACA |
| | | | CGTCCACCAACACAGTCTATTTGGACCTGAGCAGTCTGAGATCT |
| | | | GAGGACACGGCCGTGTATTTTTGTGCGAGAACTGGGGATAGGGC |
| | | | TTTTGATGTCTGGGGCCACGGGACAATAGTCACCGTCTCTTCA |
| 1515 | YANG-2233 | VH domain | QMQLVQSGAEVKKPGASVKISCKTSGYPFTNYYMVWVRQAPGQG |
| | | amino | LEWMGIIKPSGGNTIYAQKFQGRVTMTRDTSTNTVYLDLSSLRS |
| | | acid | EDTAVYFCARTGDRAFDVWGHGTIVTVSS |
| | | sequence | |
| 1516 | YANG-2233 | HCDR1 | GYPFTNYY |
| 1517 | YANG-2233 | HCDR2 | IKPSGGNT |
| 1518 | YANG-2233 | HCDR3 | ARTGDRAFDV |
| 1519 | YANG-2233 | VL domain | CAGTCTGTGTTGACGCAGCCGCCCTCAGTGTCTGCGGCCCCAGG |
| | | nucleic | ACAGAAGGTCACCATCTCCTGCTCTGGAAGCAGCTCCAACATTG |
| | | acid | GGAATAATTATGTTTCCTGGTACCAGCAGTTCCCAGGAACAGCC |
| | | sequence | CCCAAACTCCTCATTTATGACAATAATAAGCGACCCTCAGGGAT |
| | | | TCCTGACCGATTCTCTGGCTCCAAGTCTGGCACGTCAGCCACCC |
| | | | TGGGCATCACCGGACTCCAGACTGGGGACGAGGCCGATTATTAC |
| | | | TGCGGAACATGGGATAGCAGCCTGGGTGCTGGGGTGTTCGGCGG |
| | | | AGGGACCAAGCTGACCGTCCTA |
| 1520 | YANG-2233 | VL domain | QSVLTQPPSVSAAPGQKVTISCSGSSSNIGNNYVSWYQQFPGTA |
| | | amino | PKLLIYDNNKRPSGIPDRESGSKSGTSATLGITGLQTGDEADYY |
| | | acid | CGTWDSSLGAGVFGGGTKLTVL |
| | | sequence | |
| 1521 | YANG-2233 | LCDR1 | SSNIGNNY |
| 1522 | YANG-2233 | LCDR2 | DNN |
| 1523 | YANG-2233 | LCDR3 | GTWDSSLGAGV |
| 1524 | YANG-2234 | VH domain | CAGATGCAATTGGTGCAGTCTGGGACTGAGGTGAAGAAGCCTGG |
| | | nucleic | GGCCTCAGTGAAGATTTCCTGCAAGACATCTGGATACACCTTCA |
| | | acid | CCAACTACTATATGGTCTGGGTGCGACAGGCCCCTGGACAAGGA |
| | | sequence | CTTGAGTGGATGGGCATAATCAAACCTAGTGGTGGTAACACGAT |
| | | | CTACGCACAGAAGTTCCAGGGCAGAGTCACCATGACCAGGGACA |
| | | | CGTCCACGAACACAGTCTATTTGGACCTGAGCAGTCTGAGATCT |
| | | | GAGGACACGGCCATGTATTATTGTGCGAGAACTGGTGATAGGGC |
| | | | TTTTGATGTCTGGGGCCACGGGACAGTGGTCACCGTCTCTTCA |
| 1525 | YANG-2234 | VH domain | QMQLVQSGTEVKKPGASVKISCKTSGYTFTNYYMVWVRQAPGQG |
| | | amino | LEWMGIIKPSGGNTIYAQKFQGRVTMTRDTSTNTVYLDLSSLRS |
| | | acid | EDTAMYYCARTGDRAFDVWGHGTVVTVSS |
| | | sequence | |
| 1526 | YANG-2234 | HCDR1 | GYTFTNYY |
| 1527 | YANG-2234 | HCDR2 | IKPSGGNT |
| 1528 | YANG-2234 | HCDR3 | ARTGDRAFDV |
| 1529 | YANG-2234 | VL domain | CAGTCTGTGCTGACGCAGCCGCCCTCAGTGTTTGCGGCCCCAGG |
| | | nucleic | ACAGAAGGTCACCATCTCCTGCTCTGGAAGCAGCTCCAACATTG |
| | | acid | GGAATAATTATGTTTCCTGGTACCAACAGTTCCCAGGAACAGCC |
| | | sequence | CCCAAACTCCTCATCTATGACAATAATAAGCGACCCTCAGGGAT |
| | | | TCCTGACCGATTCTCTGGCTCCAAGTCTGGCACGTCAGCCACCC |
| | | | TGGGCATCACCGGACTCCAGACTGGGGACGAGGCCGATTATTAC |
| | | | TGCGGAACATGGGATAGCAGCCTGGGTGCTGGGGTGTTCGGCGG |
| | | | AGGGACCAAGCTGACCGTCCTA |
| 1530 | YANG-2234 | VL domain | QSVLTQPPSVFAAPGQKVTISCSGSSSNIGNNYVSWYQQFPGTA |
| | | amino | PKLLIYDNNKRPSGIPDRFSGSKSGTSATLGITGLQTGDEADYY |
| | | acid | CGTWDSSLGAGVFGGGTKLTVL |
| | | sequence | |
| 1531 | YANG-2234 | LCDR1 | SSNIGNNY |
| 1532 | YANG-2234 | LCDR2 | DNN |
| 1533 | YANG-2234 | LCDR3 | GTWDSSLGAGV |
| 1534 | YANG-2235 | VH domain | CAGATACAGCTGGTGCAGTCTGGGGCTGAGGTGAAGAAGCCTGG |
| | | nucleic | GGCCTCAGTGAAGCTTTCCTGCAAGACATCTGGATACACCTTCA |
| | | acid | CCAACTACTATATGGTCTGGGTGCGACAGGCCCCTGGACAAGGA |
| | | sequence | CTTGAGTGGATGGGCATAATCAAACCTACTGGTGGTAACACAAT |
| | | | CTACGCACAGAATTTCCAGGGCAGAGTCACCATGTCCAGGGACA |
| | | | CGTCCACGAACACAGTCTACATGGACCTGAGGAGTCTGAGATCT |
| | | | GAGGACGCGGCCGTGTATTATTGTGCGAGAACTGGTGATAGGGC |
| | | | TTTTGATGTCTGGGGCCAAGGGACAATGGTCACCGTCTCTTCA |
| 1535 | YANG-2235 | VH domain | QIQLVQSGAEVKKPGASVKLSCKTSGYTFTNYYMVWVRQAPGQG |
| | | amino | LEWMGIIKPTGGNTIYAQNFQGRVTMSRDTSTNTVYMDLRSLRS |
| | | acid | EDAAVYYCARTGDRAFDVWGQGTMVTVSS |
| | | sequence | |
| 1536 | YANG-2235 | HCDR1 | GYTFTNYY |
| 1537 | YANG-2235 | HCDR2 | IKPTGGNT |
| 1538 | YANG-2235 | HCDR3 | ARTGDRAFDV |
| 1539 | YANG-2235 | VL domain | CAGTCTGTGTTGACGCAGCCGCCCTCAGTGTCTGCGACCCCAGG |
| | | nucleic | ACAGAAGGTCACCATCTCCTGCTCTGGAAGCAGCTCCAACATTG |
| | | acid | GGAATAATTTTGTATCCTGGTACCAGCAGTTCCCAGGAACAGCC |
| | | sequence | CCCAAACTCCTCATTTATGACAATAATAAGCGACCCTCAGGGAT |
| | | | TCCTGACCGATTCTCTGGCTCCAAGTCTGGCACGTCAGCCACCC |
| | | | TGGGCATCACCGGACTCCAGACTGGGGACGAGGCCGATTATTAC |
| | | | TGCGGAACATGGGATAGCGGCCTGGGTGCTGGGGTGTTCGGCGG |
| | | | AGGGACCAAGCTGACCGTCCTA |
| 1540 | YANG-2235 | VL domain | QSVLTQPPSVSATPGQKVTISCSGSSSNIGNNFVSWYQQFPGTA |
| | | amino | PKLLIYDNNKRPSGIPDRFSGSKSGTSATLGITGLQTGDEADYY |
| | | acid | CGTWDSGLGAGVFGGGTKLTVL |
| | | sequence | |
| 1541 | YANG-2235 | LCDR1 | SSNIGNNF |
| 1542 | YANG-2235 | LCDR2 | DNN |
| 1543 | YANG-2235 | LCDR3 | GTWDSGLGAGV |
| 1544 | YANG-2236 | VH domain | CAGATACAACTGGTGCAGTCTGGGGCTGAGGTGAAGAAGCCTGG |
| | | nucleic | GGCCTCAGTGAAGTTTTCCTGCAAGACATCTGGATACACCTTCA |
| | | acid | CCAACTACTATTTGGTCTGGGTGCGACAGGCCCCTGGACAAGGA |
| | | sequence | CTTGAGTGGATGGGCATAATCAAACCTACTGGTGGTAACACAAT |
| | | | CTACGCACAGAACTTCCAGGGCAGAGTCACCATGACCAGGGACA |
| | | | CGTCCACGAACACAGTCTACATGGACCTGAGGAGTCTGAGATCT |
| | | | GAGGACACGGCCGTGTATTATTGTGCGAGAACTGGTGGTAGGGC |
| | | | TTTTGATGTCTGGGGCCAAGGGACAATGGTCACCGTCTCTTCA |
| 1545 | YANG-2236 | VH domain | QIQLVQSGAEVKKPGASVKFSCKTSGYTFTNYYLVWVRQAPGQG |
| | | amino | LEWMGIIKPTGGNTIYAQNFQGRVTMTRDTSTNTVYMDLRSLRS |
| | | acid | EDTAVYYCARTGGRAFDVWGQGTMVTVSS |
| | | sequence | |
| 1546 | YANG-2236 | HCDR1 | GYTFTNYY |
| 1547 | YANG-2236 | HCDR2 | IKPTGGNT |
| 1548 | YANG-2236 | HCDR3 | ARTGGRAFDV |
| 1549 | YANG-2236 | VL domain | CAGTCTGTGTTGACGCAGCCGCCCTCAGTGTCTGCGGCCCCAGG |
| | | nucleic | ACAGAAGGTCACCATCTCCTGCTCTGGAAACAGCTCCAATATTG |
| | | acid | GGGATAATTTTGTGTCCTGGTACCAACAGTTCCCAGGAACAGCC |
| | | sequence | CCCAAACTCCTCATTTATGACAATAATAAGCGACCCTCAGGGAT |
| | | | TCCTGACCGATTCTCTGGCTCCAAGTCTGGCACGTCAGCCACCC |
| | | | TGGGCATCACCGGACTCCAGACTGGGGACGAGGCCGATTATTAC |
| | | | TGCGGAACATGGGATAGCAGCCTGGGTGCTGGGGTGTTCGGCGG |
| | | | AGGGACCAGGCTGACCGTCCTA |
| 1550 | YANG-2236 | VL domain | QSVLTQPPSVSAAPGQKVTISCSGNSSNIGDNFVSWYQQFPGTA |
| | | amino | PKLLIYDNNKRPSGIPDRFSGSKSGTSATLGITGLQTGDEADYY |
| | | acid | CGTWDSSLGAGVFGGGTRLTVL |
| | | sequence | |
| 1551 | YANG-2236 | LCDR1 | SSNIGDNE |
| 1552 | YANG-2236 | LCDR2 | DNN |
| 1553 | YANG-2236 | LCDR3 | GTWDSSLGAGV |
| 1554 | YANG-2237 | VH domain | CAGATTCAGTTGGTGCAGTCTGGGGCTGAGGTGAAGAAGCCTGG |
| | | nucleic | GGCCTCAGTGAAGTTTTCTTGCAAGACATCTGGATACACCTTCA |
| | | acid | CCAACTACTATATGGTCTGGGTGCGACAGGCCCCTGGACAAGGA |
| | | sequence | CTTGAGTGGATGGGCATAATCAAACCTAGTGGTGGTAACACAAT |
| | | | CTACGCACAGAAGTTCCAGGGCAGAGTCACCATGACCAGGGACA |
| | | | CGTCCACGGACACAGTCTACATGGACCTGAACAGTCTGAGATCT |
| | | | GAGGACACGGCCGTCTATTATTGTGCGAGAACTGGAGATAGGGC |
| | | | TTTTGATGTCTGGGGCCACGGGACAATGGTCACCGTGTCTTCA |
| 1555 | YANG-2237 | VH domain | QIQLVQSGAEVKKPGASVKFSCKTSGYTFTNYYMVWVRQAPGQG |
| | | amino | LEWMGIIKPSGGNTIYAQKFQGRVTMTRDTSTDTVYMDLNSLRS |
| | | acid | EDTAVYYCARTGDRAFDVWGHGTMVTVSS |
| | | sequence | |
| 1556 | YANG-2237 | HCDR1 | GYTFTNYY |
| 1557 | YANG-2237 | HCDR2 | IKPSGGNT |
| 1558 | YANG-2237 | HCDR3 | ARTGDRAFDV |
| 1559 | YANG-2237 | VL domain | CAGTCTGTGTTGACGCAGCCGCCCTCAGTGTCTGCGGCCCCAGG |
| | | nucleic | ACAGAAGGTCACCATCTCCTGCTCTGGAAGCAGCTCCAACATTG |
| | | acid | GGAATAATTATGTATCCTGGTACCAGCAGTTCCCAGGAACAGCC |
| | | sequence | CCCAAACTCCTCATTTATGACAATAATAAGCGACCCTCAGGGAT |
| | | | TCTTGACCGATTCTCTGGCTCCAAGTCTGGCACGTCAGCCACCC |
| | | | TGGGCATCACCGGACTCCAGACTGGGGACGAGGCCGATTATTAT |
| | | | TGCGGAACATGGGATAGCAGCCTGGGTGCTGGGGTGTTCGGCGG |
| | | | AGGGACCAAACTGACCGTCCTA |
| 1560 | YANG-2237 | VL domain | QSVLTQPPSVSAAPGQKVTISCSGSSSNIGNNYVSWYQQFPGTA |
| | | amino | PKLLIYDNNKRPSGILDRFSGSKSGTSATLGITGLQTGDEADYY |
| | | acid | CGTWDSSLGAGVFGGGTKLTVL |
| | | sequence | |
| 1561 | YANG-2237 | LCDR1 | SSNIGNNY |
| 1562 | YANG-2237 | LCDR2 | DNN |
| 1563 | YANG-2237 | LCDR3 | GTWDSSLGAGV |
| 1564 | YANG-2238 | VH domain | CAGCTGCAATTGGTGCAGTCTGGGGCTGAGGTGAAGAAGCCTGG |
| | | nucleic | GGCCTCAGTGAAGATTTCCTGCAAGACATCTGGATACACCTTCA |
| | | acid | CCAACTACTATATGGTCTGGGTGCGACAGGCCCTTGGACAAGGA |
| | | sequence | CTTGAGTGGATGGGCATAATCAAACCTAGTGGTGGTTACACGAG |
| | | | CTACGCACAGAAGTTCCAGGGCAGAGTCACCATGACCAGGGACA |
| | | | CGTCCACGAACACAGTCTATTTGGACCTGAGTAGTCTGAGATCT |
| | | | GAGGACACGGCCGTGTATTATTGTGCGAGAACTGGTGATAGGGC |
| | | | ATTTGATGTCTGGGGCCACGGGACAGTGGTCACCGTCTCTTCA |
| 1565 | YANG-2238 | VH domain | QLQLVQSGAEVKKPGASVKISCKTSGYTFTNYYMVWVRQALGQG |
| | | amino | LEWMGIIKPSGGYTSYAQKFQGRVTMTRDTSTNTVYLDLSSLRS |
| | | acid | EDTAVYYCARTGDRAFDVWGHGTVVTVSS |
| | | sequence | |
| 1566 | YANG-2238 | HCDR1 | GYTFTNYY |
| 1567 | YANG-2238 | HCDR2 | IKPSGGYT |
| 1568 | YANG-2238 | HCDR3 | ARTGDRAFDV |
| 1569 | YANG-2238 | VL domain | CAGTCTGTGTTGACGCAGCCGCCCTCAGTGTCTGCGGCCCCAGG |
| | | nucleic | ACAGAAGGTCACCCTCTCCTGCTCTGGAAGCAGCTCCAACATTG |
| | | acid | GGAATAATTATGTTTCCTGGTACCAGCAGTTCCCAGGAACAGCC |
| | | sequence | CCCAAACTCCTCATCTATGACAATAATAAGCGACCCTCAGGGAT |
| | | | TCCTGACCGATTCTCTGGCTCCAAGTCTGGCACGTCAGCCACCC |
| | | | TGGGCATCACCGGACTCCAGACTGGGGACGAGGCCGATTATTAC |
| | | | TGCGGAACATGGGATAGCAGCCTGGGTGCTGGGGTGTTCGGCGG |
| | | | AGGGACCAAGCTGACCGTCCTA |
| 1570 | YANG-2238 | VL domain | QSVLTQPPSVSAAPGQKVTLSCSGSSSNIGNNYVSWYQQFPGTA |
| | | amino | PKLLIYDNNKRPSGIPDRFSGSKSGTSATLGITGLQTGDEADYY |
| | | acid | CGTWDSSLGAGVFGGGTKLTVL |
| | | sequence | |
| 1571 | YANG-2238 | LCDR1 | SSNIGNNY |
| 1572 | YANG-2238 | LCDR2 | DNN |
| 1573 | YANG-2238 | LCDR3 | GTWDSSLGAGV |
| 1574 | YANG-2239 | VH domain | CAGATGCAATTGGTGCAGTCTGGGGCTGAGGTGAAGAAGCCTGG |
| | | nucleic | GGCCTCAGTGAAGATTTCCTGCAAGACATCTGGATACATATTCA |
| | | acid | CCAACTATTATATGGTCTGGGTGCGACAGGCCCCTGGACAAGGA |
| | | sequence | CTTGAGTGGATGGGCATAATCAAACCTAGCGGTGGTAACACGAT |
| | | | CTACGCACAGAAGTTCCAGGGCAGAGTCACCATGACCAGGGACA |
| | | | CGTCCACGAACACAGTCTATTTGGACCTGAGCAGTCTGAGATAT |
| | | | GAGGACACGGCCGTCTATTATTGTGCGAGAACTGGTGATAGGGC |
| | | | TTTTGATGTCTGGGGCCACGGGACAGTGGTCACCGTCTCTTCA |
| 1575 | YANG-2239 | VH domain | QMQLVQSGAEVKKPGASVKISCKTSGYIFTNYYMVWVRQAPGQG |
| | | amino | LEWMGIIKPSGGNTIYAQKFQGRVTMTRDTSTNTVYLDLSSLRY |
| | | acid | EDTAVYYCARTGDRAFDVWGHGTVVTVSS |
| | | sequence | |
| 1576 | YANG-2239 | HCDR1 | GYIFTNYY |
| 1577 | YANG-2239 | HCDR2 | IKPSGGNT |
| 1578 | YANG-2239 | HCDR3 | ARTGDRAFDV |
| 1579 | YANG-2239 | VL domain | CAGTCTGTGTTGACGCAGCCGCCCTCAGTGTCTGCGGCCCCAGG |
| | | nucleic | ACAGAAGGTCACCATCTCCTGCTCTGGAAGCAGCTCCAACATTG |
| | | acid | GGAATAATTATGTTTCCTGGTACCAGCAGTTCCCAGGAACAGCC |
| | | sequence | CCCAAACTCCTCATCTATGACAATAATAAGCGACCCTCAGGGAT |
| | | | TCCTGACCGATTCTCTGGCTCCAAGTCTGGCACGTCAGCCACCC |
| | | | TGGGCATCACCGGACTCCAGACTGGGGACGAGGCCGATTATTAC |
| | | | TGCGGAACATGGGATAGCAGCCTGGGTGCTGGGGTGTTCGGCGG |
| | | | AGGGACCAAGCTGACCGTCCTA |
| 1580 | YANG-2239 | VL domain | QSVLTQPPSVSAAPGQKVTISCSGSSSNIGNNYVSWYQQFPGTA |
| | | amino | PKLLIYDNNKRPSGIPDRFSGSKSGTSATLGITGLQTGDEADYY |
| | | acid | CGTWDSSLGAGVFGGGTKLTVL |
| | | sequence | |
| 1581 | YANG-2239 | LCDR1 | SSNIGNNY |
| 1582 | YANG-2239 | LCDR2 | DNN |
| 1583 | YANG-2239 | LCDR3 | GTWDSSLGAGV |
| 1584 | YANG-2240 | VH domain | CAGATGCAGTTGGTGCAGTCTGGGGCTGAGGTGAAGAAGCCTGG |
| | | nucleic | GGCCTCAGTGAAGATTTCCTGCAAGACATCTGGATACACCTTCA |
| | | acid | TCAACTACTATATGGTCTGGGTGCGACAGGCCCCTGGACAAGGA |
| | | sequence | CTTGAGTGGATGGGCATAATCAAACCTAGTGGTGGTAACACGAT |
| | | | CTACGCACAGAAGTTCCAGGGCAGAGTCACCATGACCAGGGACA |
| | | | CGTCCACGAACACAGTCTATATGGACCTGAGCAGTCTGAGATCT |
| | | | GAGGACACGGCCGTGTATTATTGTGCGAGAACTGGGGATAGGGC |
| | | | TTTTGATGTCTGGGGCCACGGGACAATGGTCACCGTCTCTTCA |
| 1585 | YANG-2240 | VH domain | QMQLVQSGAEVKKPGASVKISCKTSGYTFINYYMVWVRQAPGQG |
| | | amino | LEWMGIIKPSGGNTIYAQKFQGRVTMTRDTSTNTVYMDLSSLRS |
| | | acid | EDTAVYYCARTGDRAFDVWGHGTMVTVSS |
| | | sequence | |
| 1586 | YANG-2240 | HCDR1 | GYTFINYY |
| 1587 | YANG-2240 | HCDR2 | IKPSGGNT |
| 1588 | YANG-2240 | HCDR3 | ARTGDRAFDV |
| 1589 | YANG-2240 | VL domain | CAGTCTGTGTTGACGCAGCCGCCCTCAGTGTCTGCGGCCCCAGG |
| | | nucleic | ACAGAAGGTCACCATCTCCTGCTCTGGAAGCAGCTCCAACATTG |
| | | acid | GGAATAATTTTGTTTCCTGGTACCAGCAGTTCCCAGGAACAGCC |
| | | sequence | CCCAAACTCCTCATTTATGACAATCATAAGCGACCCTCAGGGAT |
| | | | TCCTGACCGATTCTCTGCCTCCAAGTCTGGCACGTCAGCCACCC |
| | | | TGGGCATCACCGGACTCCAGACTGGGGACGAGGCCGATTATTAC |
| | | | TGCGGAACATGGGATAGCGGCCTGGGTGCTGGGGTGTTCGGCGG |
| | | | AGGGACCAAGCTGACCGTCCTA |
| 1590 | YANG-2240 | VL domain | QSVLTQPPSVSAAPGQKVTISCSGSSSNIGNNFVSWYQQFPGTA |
| | | amino | PKLLIYDNHKRPSGIPDRFSASKSGTSATLGITGLQTGDEADYY |
| | | acid | CGTWDSGLGAGVFGGGTKLTVL |
| | | sequence | |
| 1591 | YANG-2240 | LCDR1 | SSNIGNNF |
| 1592 | YANG-2240 | LCDR2 | DNH |
| 1593 | YANG-2240 | LCDR3 | GTWDSGLGAGV |
| 1594 | YANG-2241 | VH domain | CAGATTCAATTGGTGCAGTCTGGGGCTGAGGTGAAGAAGCCTGG |
| | | nucleic | GGCCTCAGTGAAGATTTCCTGCAAGACATCTGGATATATCTTCA |
| | | acid | CCAACTACTATATGGTCTGGGTGCGACAGGCCCCTGGACAAGGA |
| | | sequence | CTTGAGTGGATGGGCATAATCAAACCTAGTGGTGGTAACACGAT |
| | | | CTACGCACAGAAGTTCCAGGGCAGAGTCACCATGACCAGGGACA |
| | | | CGTCCACGACCACAGTCTATTTGGACCTGAACAGTCTGAGATCT |
| | | | GAGGACACGGCCGTGTATTATTGTGCGAGAACTGGTGATAGGGC |
| | | | TTTTGATGTCTGGGGCCACGGGACAGTGGTCACCGTCTCTTCA |
| 1595 | YANG-2241 | VH domain | QIQLVQSGAEVKKPGASVKISCKTSGYIFTNYYMVWVRQAPGQG |
| | | amino | LEWMGIIKPSGGNTIYAQKFQGRVTMTRDTSTTTVYLDLNSLRS |
| | | acid | EDTAVYYCARTGDRAFDVWGHGTVVTVSS |
| | | sequence | |
| 1596 | YANG-2241 | HCDR1 | GYIFTNYY |
| 1597 | YANG-2241 | HCDR2 | IKPSGGNT |
| 1598 | YANG-2241 | HCDR3 | ARTGDRAFDV |
| 1599 | YANG-2241 | VL domain | CAGTCTGTGTTGACGCAGCCGCCCTCAGTGTCTGCGGCCCCAGG |
| | | nucleic | ACAGAAGGTCACCATCTCCTGCTCTGGAAGCAGCTCCAACATTG |
| | | acid | GGAATAATTATGTTTCCTGGTACCAGCAATTCCCAGGAACAGCC |
| | | sequence | CCCAAACTCCTCATCTATGACAATAATAAGCGACCCTCAGGGAT |
| | | | TCCTGACCGATTCTCTGGCTCCAAGTCTGGCACGTCAGCCACCC |
| | | | TGGGCATCACCGGACTCCAGACTGGGGACGAGGCCGATTATTAC |
| | | | TGCGGAACATGGGATAGCAGCCTGGGTGCTGGGGTGTTCGGCGG |
| | | | AGGGACCAAGCTGACCGTCCTG |
| 1600 | YANG-2241 | VL domain | QSVLTQPPSVSAAPGQKVTISCSGSSSNIGNNYVSWYQQFPGTA |
| | | amino | PKLLIYDNNKRPSGIPDRFSGSKSGTSATLGITGLQTGDEADYY |
| | | acid | CGTWDSSLGAGVFGGGTKLTVL |
| | | sequence | |
| 1601 | YANG-2241 | LCDR1 | SSNIGNNY |
| 1602 | YANG-2241 | LCDR2 | DNN |
| 1603 | YANG-2241 | LCDR3 | GTWDSSLGAGV |
| 1604 | YANG-2242 | VH domain | CAGATGCAGCTGGTGCAGTCTGGGGCTGAGGTGAAGAAGCCTGG |
| | | nucleic | GGCCTCAGTGAAGATTTCCTGCAAGACATCTGGATACACCTTCA |
| | | acid | CCAGTTACTATATGGTCTGGGTGCGACAGGCCCCTGGACAAGGA |
| | | sequence | CTTGAATGGATGGGCATAATCAAACCTAGTGGTGGTAACACAAT |
| | | | CTACGCACAGAAATTCCAGGGCAGAGTCACCATGACCAGGGACA |
| | | | CGTCCACGAATACAGTCTTCATGGACCTGAGGAGTCTGAGATCT |
| | | | GAGGACACGGCCGTGTATTATTGTGCGAGAACTGGGGATAGGGC |
| | | | TTTTGATGTCTGGGGCCAAGGGACAGTGGTCACCGTCTCTTCA |
| 1605 | YANG-2242 | VH domain | QMQLVQSGAEVKKPGASVKISCKTSGYTFTSYYMVWVRQAPGQG |
| | | amino | LEWMGIIKPSGGNTIYAQKFQGRVTMTRDTSINTVFMDLRSLRS |
| | | acid | EDTAVYYCARTGDRAFDVWGQGTVVTVSS |
| | | sequence | |
| 1606 | YANG-2242 | HCDR1 | GYTFTSYY |
| 1607 | YANG-2242 | HCDR2 | IKPSGGNT |
| 1608 | YANG-2242 | HCDR3 | ARTGDRAFDV |
| 1609 | YANG-2242 | VL domain | CAGTCTGTGTTGACGCAGCCGCCCTCAGTGTCTGCGGCCCCAGG |
| | | nucleic | ACAGAAGGTCACCATCTCCTGCTCTGGAAGCAGCTCCAACATTG |
| | | acid | GGAATAATTTTGTATCCTGGTACCTGCAGTTCCCAGGAACAGCC |
| | | sequence | CCCAAACTCCTCATTTTTGACAATAATAAGCGACCCTCAGGGAT |
| | | | TCCTGACCGATTCTCTGGCTCCAAGTCTGGCACGTCAGCCACCC |
| | | | TGGGCATCTCCGGACTCCAGACTGGGGACGAGGCCGATTATTAC |
| | | | TGCGGAACATGGGATAGCAGCCTGGGTGCTGGGGTGTTCGGCGG |
| | | | AGGGACCCAACTGACCGTCCTA |
| 1610 | YANG-2242 | VL domain | QSVLTQPPSVSAAPGQKVTISCSGSSSNIGNNFVSWYLQFPGTA |
| | | amino | PKLLIFDNNKRPSGIPDRFSGSKSGTSATLGISGLQTGDEADYY |
| | | acid | CGTWDSSLGAGVFGGGTQLTVL |
| | | sequence | |
| 1611 | YANG-2242 | LCDR1 | SSNIGNNE |
| 1612 | YANG-2242 | LCDR2 | DNN |
| 1613 | YANG-2242 | LCDR3 | GTWDSSLGAGV |
| 1614 | YANG-2243 | VH domain | CAGATGCAGTTGGTGCAGTCTGGGGCTGAGGTGAAGAAGCCTGG |
| | | nucleic | GGCCTCAGTGAAGATTTCCTGCAAGACATCTGGATACACCTTCA |
| | | acid | CCAATTACTATATGGTCTGGGTGCGACAGGCCCCTGGACAAGGA |
| | | sequence | CTTGAGTGGATGGGCATAATCAAACCTAGTGGTGGTAACACGAT |
| | | | CTACGCACAGAAGTTCCAGGGCAGAGTCACCATGACCAGGGACA |
| | | | CGTCCACGAACACAGTCTATATGGACCTGAGCAGTCTGAGATCT |
| | | | GAGGACACGGCCGTGTATTATTGTGCGAGAACTGGGGATAGGGC |
| | | | TTTTGATGTCTGGGGCCACGGGACAATGGTCACCGTCTCTTCA |
| 1615 | YANG-2243 | VH domain | QMQLVQSGAEVKKPGASVKISCKTSGYTFTNYYMVWVRQAPGQG |
| | | amino | LEWMGIIKPSGGNTIYAQKFQGRVTMTRDTSTNTVYMDLSSLRS |
| | | acid | EDTAVYYCARTGDRAFDVWGHGTMVTVSS |
| | | sequence | |
| 1616 | YANG-2243 | HCDR1 | GYTFTNYY |
| 1617 | YANG-2243 | HCDR2 | IKPSGGNT |
| 1618 | YANG-2243 | HCDR3 | ARTGDRAFDV |
| 1619 | YANG-2243 | VL domain | CAGTCTGTGTTGACGCAGCCGCCCTCAGTGTCTGCGGCCCCAGG |
| | | nucleic | ACAGAAGGTCACCATCTCCTGCTCTGGAAGCAGCTCCAACATTG |
| | | acid | GGAATAATTATCTTTCCTGGTACCAGCAGTTCCCAGGAACAGCC |
| | | sequence | CCCAAACTCCTCATTTATGACAATAATAAACGACCCTCAGGGAT |
| | | | TCCTGACCGATTCTCTGGCTCCAAGTCTGGCACGTCAGCCACCC |
| | | | TGGGCATCACCGGACTCCAGACTGGGGACGAGGCCGATTATTAC |
| | | | TGCGGAACATGGGATAGCAGCCTGGGTGCTGGGGTGTTCGGCGG |
| | | | AGGGACCAAGGTGACCGTCCTA |
| 1620 | YANG-2243 | VL domain | QSVLTQPPSVSAAPGQKVTISCSGSSSNIGNNYLSWYQQFPGTA |
| | | amino | PKLLIYDNNKRPSGIPDRFSGSKSGTSATLGITGLQTGDEADYY |
| | | acid | CGTWDSSLGAGVFGGGTKVTVL |
| | | sequence | |
| 1621 | YANG-2243 | LCDR1 | SSNIGNNY |
| 1622 | YANG-2243 | LCDR2 | DNN |
| 1623 | YANG-2243 | LCDR3 | GTWDSSLGAGV |
| 1624 | YANG-2244 | VH domain | CAGATGCAATTGGTGCAGTCTGGGGCTGAGGTGAAGAAGCCTGG |
| | | nucleic | GACCTCAGTGAAGATTTCCTGCAAGACATCTGGATACACCTTCA |
| | | acid | CCAACTACTATATGGTCTGGGTGCGACAGGCCCCTGGACAAGGA |
| | | sequence | CTTGAGTGGATGGGCATAATCAAACCTAGTGGTGGTAACACGAT |
| | | | CTACGCACAGAAGTTCCAGGGCAGAGTCACCATGACCAGGGACA |
| | | | CGTCCACGAACACAGTCTATTTGGACCTGAGCAGTCTGAGATCT |
| | | | GAGGACACGGCCGTGTATTATTGTGCGAGAACTGGGGATAGGGC |
| | | | TTTTGATGTCTGGGGCCACGGGACAATGGTCACCGTCTCTTCA |
| 1625 | YANG-2244 | VH domain | QMQLVQSGAEVKKPGTSVKISCKTSGYTFTNYYMVWVRQAPGQG |
| | | amino | LEWMGIIKPSGGNTIYAQKFQGRVTMTRDTSTNTVYLDLSSLRS |
| | | acid | EDTAVYYCARTGDRAFDVWGHGTMVTVSS |
| | | sequence | |
| 1626 | YANG-2244 | HCDR1 | GYTFTNYY |
| 1627 | YANG-2244 | HCDR2 | IKPSGGNT |
| 1628 | YANG-2244 | HCDR3 | ARTGDRAFDV |
| 1629 | YANG-2244 | VL domain | CAGTCTGTGTTGACGCAGCCGCCCTCAGTGTCTGCGGCCCCAGG |
| | | nucleic | ACAGAAGGTCACCATCTCCTGCTCTGGAAGCAGCTCCAACATTG |
| | | acid | GGAATAATTATGTTTCCTGGTACCAGCAGTTCCCAGGAACAGCC |
| | | sequence | CCCAAACTCCTCATTTATGACAATAATAAGCGACCCTCAGGGAT |
| | | | TCCTGACCGATTCTCTGGCTCCAAGTCTGGCACGTCAGCCACCC |
| | | | TGGGCATCACCGGACTCCAGACTGGGGACGAGGCCGATTATTAC |
| | | | TGCGGAACATGGGATAGCAGCCTGGGTGCTGGGGTGTTCGGCGG |
| | | | AGGGACCACGCTGACCGTCCTA |
| 1630 | YANG-2244 | VL domain | QSVLTQPPSVSAAPGQKVTISCSGSSSNIGNNYVSWYQQFPGTA |
| | | amino | PKLLIYDNNKRPSGIPDRESGSKSGTSATLGITGLQTGDEADYY |
| | | acid | CGTWDSSLGAGVFGGGTTLTVL |
| | | sequence | |
| 1631 | YANG-2244 | LCDR1 | SSNIGNNY |
| 1632 | YANG-2244 | LCDR2 | DNN |
| 1633 | YANG-2244 | LCDR3 | GTWDSSLGAGV |
| 1634 | YANG-2245 | VH domain | CAGATTCAGTTGGTGCAGTCTGGGGCTGAGGTGAAGAAGCCTGG |
| | | nucleic | GGCCTCAGTGAAGTTTTCCTGTAAGACATCTGGATACACCTTCA |
| | | acid | CCAGCTACTATATGGTCTGGGTGCGACAGGCCCCTGGACAAGGA |
| | | sequence | CTTGAGTGGATGGGCATAATCAAACCTAGTGGTGGTAACACAAT |
| | | | CTACGCACAGAAGTTCCAGGGCAGAGTCACCATGACCAGGGACA |
| | | | CGTCCACAAACACAGTCTACATGGACCTGAACAGTCTGAGATCT |
| | | | GAGGACACGGCCGTCTATTATTGTGCGAGAACTGGAGATAGGGC |
| | | | TTTTGATGTCTGGGGCCACGGGACAATGGTCACCGTGTCTTCA |
| 1635 | YANG-2245 | VH domain | QIQLVQSGAEVKKPGASVKFSCKTSGYTFTSYYMVWVRQAPGQG |
| | | amino | LEWMGIIKPSGGNTIYAQKFQGRVTMTRDTSTNTVYMDLNSLRS |
| | | acid | EDTAVYYCARTGDRAFDVWGHGTMVTVSS |
| | | sequence | |
| 1636 | YANG-2245 | HCDR1 | GYTFTSYY |
| 1637 | YANG-2245 | HCDR2 | IKPSGGNT |
| 1638 | YANG-2245 | HCDR3 | ARTGDRAFDV |
| 1639 | YANG-2245 | VL domain | CAGTCTGTGTTGACGCAGCCGCCCTCAGTGTCTGCGGCCCCAGG |
| | | nucleic | ACAGAAGGTCCCCATCTCCTGCCCTGGAAGCAGCTCCAACATTG |
| | | acid | GGAATAATTATGTATCCTGGTACCACCAGTTCCCAGGGACAACC |
| | | sequence | CCCAAACTCCTCATTTATGACAATAATAAGCGACCCTCAGGGAT |
| | | | TCCTGACCGATTCTCCGGCTCCAAGTCTGGCACGGCAGCCACCC |
| | | | TGGGCATCACCGGACTCCAGACTGGGGACGAGGCCGATTATTAC |
| | | | TGCGGAACATGGGATAGCAGCCTGGGTGCTGGGGTGTTCGGCGG |
| | | | AGGGACCAAACTGACCGTCCTA |
| 1640 | YANG-2245 | VL domain | QSVLTQPPSVSAAPGQKVPISCPGSSSNIGNNYVSWYHQFPGTT |
| | | amino | PKLLIYDNNKRPSGIPDRFSGSKSGTAATLGITGLQTGDEADYY |
| | | acid | CGTWDSSLGAGVFGGGTKLTVL |
| | | sequence | |
| 1641 | YANG-2245 | LCDR1 | SSNIGNNY |
| 1642 | YANG-2245 | LCDR2 | DNN |
| 1643 | YANG-2245 | LCDR3 | GTWDSSLGAGV |
| 1644 | YANG-2246 | VH domain | CAGATGCAGTTGGTGCAGTCTGGGGCTGAGGTGAAGAAGCCTGG |
| | | nucleic | GGCCTCAGTGAAGATTTCCTGCAAGACATCTGGATACACCTTCA |
| | | acid | CCAACTACTATATGGTCTGGGTGCGACAGGCCCCGGGACAAGGA |
| | | sequence | CTTGAGTGGATGGGCATAATCAAACCTAGTGGCGGTGACACGAT |
| | | | CTACGCACAGAAGTTCCAGGGCAGAGTCACCATGACCAGGGACA |
| | | | CGTCCACGAACACAGTCTATATGGACCTGAGCAGTCTGAGATCT |
| | | | GAGGACACGGCCGTGTATTATTGTGCGAGAACTGGGAATAGGGC |
| | | | TTTTGATGTCTGGGGCCACGGGACAATGGTCACCGTCTCTTCA |
| 1645 | YANG-2246 | VH domain | QMQLVQSGAEVKKPGASVKISCKTSGYTFTNYYMVWVRQAPGQG |
| | | amino | LEWMGIIKPSGGDTIYAQKFQGRVTMTRDTSTNTVYMDLSSLRS |
| | | acid | EDTAVYYCARTGNRAFDVWGHGTMVTVSS |
| | | sequence | |
| 1646 | YANG-2246 | HCDR1 | GYTFTNYY |
| 1647 | YANG-2246 | HCDR2 | IKPSGGDT |
| 1648 | YANG-2246 | HCDR3 | ARTGNRAFDV |
| 1649 | YANG-2246 | VL domain | CAGTCTGTGTTGACGCAGCCGCCCTCAGTGTCTGCGGCCCCAGG |
| | | nucleic | ACAGAAGGTCACCATCTCCTGCTCTGGAAGCAGCTCCAACATTG |
| | | acid | GGAATAATTATGTTTCCTGGTACCAGCAGTTCCCAGGAACAGCC |
| | | sequence | CCCAAACTCCTCATTTATGACAATAATAAGCGACCCTCAGGGAT |
| | | | TCCTGACCGATTCTCTGGCTCCAAGTCTGGCACGTCAGCCACCC |
| | | | TGGGCATCACCGGACTCCAGACTGGGGACGAGGCCGATTATTAC |
| | | | TGCGGAACATGGGATAGCAGCCTGGGTGCTGGGGTGTTCGGCGG |
| | | | AGGGACCAAGCTGACCGTCCTA |
| 1650 | YANG-2246 | VL domain | QSVLTQPPSVSAAPGQKVTISCSGSSSNIGNNYVSWYQQFPGTA |
| | | amino | PKLLIYDNNKRPSGIPDRFSGSKSGTSATLGITGLQTGDEADYY |
| | | acid | CGTWDSSLGAGVFGGGTKLTVL |
| | | sequence | |
| 1651 | YANG-2246 | LCDR1 | SSNIGNNY |
| 1652 | YANG-2246 | LCDR2 | DNN |
| 1653 | YANG-2246 | LCDR3 | GTWDSSLGAGV |
| 1654 | YANG-2247 | VH domain | CAGATGCAGTTGGTGCAGTCTGGGGCTGAGGTGAAGAAGCCTGG |
| | | nucleic | GGCCTCAGTGAAGATTTCCTGCAAGACATCTGGATACACCTTCA |
| | | acid | CCGACTACTATATGGTCTGGGTGCGACAGGCCCCTGGACAAGGA |
| | | sequence | CTTGAGTGGATGGGCATGATCAAACCCAGTGGTGGTAACACGAT |
| | | | CTACGCACAGAAGTTCCAGGGCAGAGTCACCATGACCAGGGACA |
| | | | CGTCCACGAACACAGTCTATATGGACCTGAGCAGTCTGAGGTCT |
| | | | GAGGACACGGCCGTGTATTATTGCACAAGAACTGGGAATAGGGC |
| | | | TTTTGATGTCTGGGGCCACGGGACAATGGTCACCGTCTCTTCA |
| 1655 | YANG-2247 | VH domain | QMQLVQSGAEVKKPGASVKISCKTSGYTFTDYYMVWVRQAPGQG |
| | | amino | LEWMGMIKPSGGNTIYAQKFQGRVTMTRDTSTNTVYMDLSSLRS |
| | | acid | EDTAVYYCTRTGNRAFDVWGHGTMVTVSS |
| | | sequence | |
| 1656 | YANG-2247 | HCDR1 | GYTFTDYY |
| 1657 | YANG-2247 | HCDR2 | IKPSGGNT |
| 1658 | YANG-2247 | HCDR3 | TRTGNRAFDV |
| 1659 | YANG-2247 | VL domain | CAGTCTGTGTTGACGCAGCCGCCCTCAGTGTCTGCGGCCCCAGG |
| | | nucleic | ACAGAAGGTCACCATCTCCTGCTCTGGAAGCAGCTCCAACATTG |
| | | acid | CGAATAATTATGTTTCCTGGTACCAGCAGTTCCCAGGAACAGCC |
| | | sequence | CCCAAACTCCTCATTTTTGACAATAATAAGCGACCCTCAGGGAT |
| | | | TCCTGACCGATTCTCTGGCTCCAAGTCTGGCACGTCAGCCACCC |
| | | | TGGGCATCACCGGACTCCAGACTGGGGACGAGGCCGATTATTAC |
| | | | TGCGGAACATGGGATAGCAGCCTGGGTGCTGGGGTGTTCGGCGG |
| | | | AGGGACCAAGCTGACCGTCCTA |
| 1660 | YANG-2247 | VL domain | QSVLTQPPSVSAAPGQKVTISCSGSSSNIANNYVSWYQQFPGTA |
| | | amino | PKLLIFDNNKRPSGIPDRFSGSKSGTSATLGITGLQTGDEADYY |
| | | acid | CGTWDSSLGAGVFGGGTKLTVL |
| | | sequence | |
| 1661 | YANG-2247 | LCDR1 | SSNIANNY |
| 1662 | YANG-2247 | LCDR2 | DNN |
| 1663 | YANG-2247 | LCDR3 | GTWDSSLGAGV |
| 1664 | YANG-2248 | VH domain | CAGATGCAATTGGTGCAATCTGGGGCTGAGGTGAAGAAGCCTGG |
| | | nucleic | GGCCTCAGTGAAGATTTCCTGCAAGACATCTGGATACACCTTCA |
| | | acid | CCAACTACTATATGGTCTGGGTGCGACAGGCCCCTGGCCAAGGA |
| | | sequence | CTTGAGTGGATGGGCATAATCAAACCTAGTGGTGGTAACACGAT |
| | | | CTACGCACAGAAGTTCCAGGACAGAGTCACCATGACCAGGGACA |
| | | | CGTCCACGAACACAGTCTATTTGGACCTGAGCAGTCTGAGATCT |
| | | | GAGGACACGGCCGTCTATTATTGTGCGAGAACTGGGGATAGGGC |
| | | | TTTTGATGTCTGGGGCCACGGGACAATGGTCACCGTCTCTTCA |
| 1665 | YANG-2248 | VH domain | QMQLVQSGAEVKKPGASVKISCKTSGYTFTNYYMVWVRQAPGQG |
| | | amino | LEWMGIIKPSGGNTIYAQKFQDRVTMTRDTSTNTVYLDLSSLRS |
| | | acid | EDTAVYYCARTGDRAFDVWGHGTMVTVSS |
| | | sequence | |
| 1666 | YANG-2248 | HCDR1 | GYTFTNYY |
| 1667 | YANG-2248 | HCDR2 | IKPSGGNT |
| 1668 | YANG-2248 | HCDR3 | ARTGDRAFDV |
| 1669 | YANG-2248 | VL domain | CAGTCTGTGTTGACGCAGCCGCCCTCAGTGTCTGCGGCCCCAGG |
| | | nucleic | ACAGAAGGTCACCATCTCCTGCTCTGGAAGCAGCTCCAACATTG |
| | | acid | GGAATAATTTTGTTTCCTGGTACCAGCAGTTCCCAGGAACAGCC |
| | | sequence | CCCAAACTCCTCATTTATGTCAATAATAAGCGACCCTCAGGGAT |
| | | | TCCTGACCGATTCTCTGGCTCCAGGTCTGGCACGTCAGCCACCC |
| | | | TGGGCATCACCGGACTCCAGACTGGGGACGAGGCCGATTATTAC |
| | | | TGCGGAACATGGGATAGCAGCCTGGGTGCTGGGGTGTTCGGCGG |
| | | | AGGGACCAAGCTGACCGTCCTA |
| 1670 | YANG-2248 | VL domain | QSVLTQPPSVSAAPGQKVTISCSGSSSNIGNNFVSWYQQFPGTA |
| | | amino | PKLLIYVNNKRPSGIPDRESGSRSGTSATLGITGLQTGDEADYY |
| | | acid | CGTWDSSLGAGVFGGGTKLTVL |
| | | sequence | |
| 1671 | YANG-2248 | LCDR1 | SSNIGNNF |
| 1672 | YANG-2248 | LCDR2 | VNN |
| 1673 | YANG-2248 | LCDR3 | GTWDSSLGAGV |
| 1674 | YANG-2249 | VH domain | CAGATGCAATTGGTGCAATCTGGGGCTGAGGTGAAGAAGCCTGG |
| | | nucleic | GGCCTCAGTGAAGATTTCCTGCAAGACATCTGGATACACCTTCA |
| | | acid | CCAAGTACTATATGGTCTGGGTGCGACAGGCCCCTGGACAAGGA |
| | | sequence | CTTGAGTGGATGGGCATAATCAAACCTAGTGGTGGTAACACGAT |
| | | | CTACGCACAGAAGTTCCAGGGCAGAGTCACCATGACCAGGGACA |
| | | | CGTCCACGAACACAGTCTATTTGGACCTGAGCAGTCTGAGATCT |
| | | | GAGGACACGGCCGTCTATTATTGTGCCAGAACTGGGGATAGGGC |
| | | | TTTTGATGTCTGGGGCCACGGGACAATGGTCACCGTCTCTTCA |
| 1675 | YANG-2249 | VH domain | QMQLVQSGAEVKKPGASVKISCKTSGYTFTKYYMVWVRQAPGQG |
| | | amino | LEWMGIIKPSGGNTIYAQKFQGRVTMTRDTSTNTVYLDLSSLRS |
| | | acid | EDTAVYYCARTGDRAFDVWGHGTMVTVSS |
| | | sequence | |
| 1676 | YANG-2249 | HCDR1 | GYTFTKYY |
| 1677 | YANG-2249 | HCDR2 | IKPSGGNT |
| 1678 | YANG-2249 | HCDR3 | ARTGDRAFDV |
| 1679 | YANG-2249 | VL domain | CAGTCTGTATTGACGCAGCCGCCCTCAGTGTCTGCGGCCCCAGG |
| | | nucleic | ACAGAAGGTCACCATCTCCTGCTCTGGAAGCAACTCCAACATTG |
| | | acid | GGAATAATTTTGTTTCCTGGTACCAGCAGTTCCCAGGAACAGCC |
| | | sequence | CCCAAACTCCTCATTTATGACAATAATAAACGACCCTCAGGGAT |
| | | | TCCTGACCGATTCTCTGGCTCCAAGTCTGGCACGTCAGCCACCC |
| | | | TGGGCATCACCGGACTCCAGACTGGGGACGAGGCCGATTATTAC |
| | | | TGCGGAACATGGGATAGCAGCCTGGGTGCTGGGGTGTTCGGCGG |
| | | | AGGGACCAAGCTGACCGTCCTA |
| 1680 | YANG-2249 | VL domain | QSVLTQPPSVSAAPGQKVTISCSGSNSNIGNNFVSWYQQFPGTA |
| | | amino | PKLLIYDNNKRPSGIPDRESGSKSGTSATLGITGLQTGDEADYY |
| | | acid | CGTWDSSLGAGVFGGGTKLTVL |
| | | sequence | |
| 1681 | YANG-2249 | LCDR1 | NSNIGNNF |
| 1682 | YANG-2249 | LCDR2 | DNN |
| 1683 | YANG-2249 | LCDR3 | GTWDSSLGAGV |
| 1684 | YANG-2250 | VH domain | CAGATACAGCTGGTGCAGTCTGGGGCTGAGGTGAAGAAGCCTGG |
| | | nucleic | GTCCTCAGTGAAGTTTTCCTGCAAGACATCTGGATACACCTTCA |
| | | acid | CCAACTACTATATGGTCTGGGTGCGACAGGCCCCTGGACAAGGA |
| | | sequence | CTTGAGTGGATGGGCATAATCAAACCTAGTGGTGGTAACACAAT |
| | | | CTACGCACAGAATTTCCAGGGCAGAGTCACCATGACCAGGGACA |
| | | | CGTCCACGAACACAGTCTACATGGACCTGAGGAGTCTGAGATCT |
| | | | GAGGACACGGCCGTCTATTATTGTGCGAGAACTGGTGATAGGGC |
| | | | TTTTGATGTCTGGGGCCAAGGGACAATGGTCACCGTCTCTTCA |
| 1685 | YANG-2250 | VH domain | QIQLVQSGAEVKKPGSSVKFSCKTSGYTFTNYYMVWVRQAPGQG |
| | | amino | LEWMGIIKPSGGNTIYAQNFQGRVTMTRDTSTNTVYMDLRSLRS |
| | | acid | EDTAVYYCARTGDRAFDVWGQGTMVTVSS |
| | | sequence | |
| 1686 | YANG-2250 | HCDR1 | GYTFTNYY |
| 1687 | YANG-2250 | HCDR2 | IKPSGGNT |
| 1688 | YANG-2250 | HCDR3 | ARTGDRAFDV |
| 1689 | YANG-2250 | VL domain | CAGTCTGTGTTGACGCAGCCGCCCTCAGTGTCTGCGACCCCAGG |
| | | nucleic | ACAGAAGGTCACCATCTCCTGCTCTGGAAGCAGCTCCAACATTG |
| | | acid | GGAATAATTTTGTATCCTGGTACCAGCAGTTCCCAGGAACAGCC |
| | | sequence | CCCCAACTCCTCATTTATGACAATAATAAGCGACCCTCAGGGAT |
| | | | TCCTGACCGATTCTCTGGCTCCCAGTCTGGCACGTCAGCCACCC |
| | | | TGGGCATCACCGGACTCCAGACTGGGGACGAGGCCGATTATTAC |
| | | | TGCGGAACATGGGATAGCAGCCTGGGTGCTGGGGTGTTCGGCGG |
| | | | AGGGACCAAGCTGACCGTCCTA |
| 1690 | YANG-2250 | VL domain | QSVLTQPPSVSATPGQKVTISCSGSSSNIGNNFVSWYQQFPGTA |
| | | amino | PQLLIYDNNKRPSGIPDRFSGSQSGTSATLGITGLQTGDEADYY |
| | | acid | CGTWDSSLGAGVFGGGTKLTVL |
| | | sequence | |
| 1691 | YANG-2250 | LCDR1 | SSNIGNNE |
| 1692 | YANG-2250 | LCDR2 | DNN |
| 1693 | YANG-2250 | LCDR3 | GTWDSSLGAGV |
| 1694 | YANG-2251 | VH domain | CAGATTCAGTTGGTGCAGTCTGGGGCTGAGGTGAAGAAGCCTGG |
| | | nucleic | GGCCTCAGTGAAATTTTCCTGCAAGACATCTGGATACACCTTCA |
| | | acid | CCAGCTACTATATGGTCTGGGTGCGACAGGCCCCTGGACAAGGA |
| | | sequence | CTTGAGTGGATGGGCATAATCAAACCTAGTGGTGGTAACACAAT |
| | | | CTACGCACAGAAGTTCCAGGGCAGAGTCACCATGACCAGGGACA |
| | | | CGTCCACGAACACAGTCTTCATGGACCTGAACAGTCTGAGATCT |
| | | | GAGGACACGGCCGTCTATTATTGTGCGAGAACTGGAGATAGGGC |
| | | | TTTTGATGTCTGGGGCCACGGGACAATGGTCACCGTGTCTTCA |
| 1695 | YANG-2251 | VH domain | QIQLVQSGAEVKKPGASVKFSCKTSGYTFTSYYMVWVRQAPGQG |
| | | amino | LEWMGIIKPSGGNTIYAQKFQGRVTMTRDTSTNTVFMDLNSLRS |
| | | acid | EDTAVYYCARTGDRAFDVWGHGTMVTVSS |
| | | sequence | |
| 1696 | YANG-2251 | HCDR1 | GYTFTSYY |
| 1697 | YANG-2251 | HCDR2 | IKPSGGNT |
| 1698 | YANG-2251 | HCDR3 | ARTGDRAFDV |
| 1699 | YANG-2251 | VL domain | CAGTCTGTGTTGACGCAGCCGCCCTCAGTGTCTGCGGCCCCAGG |
| | | nucleic | ACAGAAGGTCACCATCTCCTGCTCTGGAAGCAGTTCCAACATTG |
| | | acid | GGAATAATTATGTATCCTGGTACCAGCAGTTCCCAGGAACAGCC |
| | | sequence | CCCAAACTCCTCATTTATGACAATAATAAGCGACCCTCAGGGAT |
| | | | TCCTGACCGATTCTCTGGCTCCAAGTCTGGCACGTCAGCCACCC |
| | | | TGGGCATCACCGGACTCCAGACTGGGGACGAGGCCGATTATTAC |
| | | | TGCGGAACATGGGATAGCAGCCTGGGTGCTGGGGTGTTCGGCGG |
| | | | AGGGACCAAACTGACCGTCCTA |
| 1700 | YANG-2251 | VL domain | QSVLTQPPSVSAAPGQKVTISCSGSSSNIGNNYVSWYQQFPGTA |
| | | amino | PKLLIYDNNKRPSGIPDRFSGSKSGTSATLGITGLQTGDEADYY |
| | | acid | CGTWDSSLGAGVFGGGTKLTVL |
| | | sequence | |
| 1701 | YANG-2251 | LCDR1 | SSNIGNNY |
| 1702 | YANG-2251 | LCDR2 | DNN |
| 1703 | YANG-2251 | LCDR3 | GTWDSSLGAGV |
| 1704 | YANG-2252 | VH domain | CAGATACAGCTGGTGCAGTCTGGGGCTGAGGTGAAGAAGCCTGG |
| | | nucleic | GGCCTCAGTGAAGTTTTCCTGCAAGACATCTGGATACACCTTCA |
| | | acid | CCAACTACTATATGGTCTGGGTGCGACAGGCCCCTGGACAAGGA |
| | | sequence | CTTGAGTGGATGGGCATAATCAAACCTAGTGGTGGTAACACAAT |
| | | | CTACGCACAGAACTTCCAGGGCAGAGTCACCATGACCAGGGACA |
| | | | CGTCCACGAACACAGTCTACATGGACCTGAGGAGTCTGAGATCT |
| | | | GAGGACACGGCCGTGTATTATTGTGCGAGAACTGGTGATAGGGC |
| | | | TTTTGATGTCTGGGGCCAAGGGACAATGGTCACCGTCTCTTCA |
| 1705 | YANG-2252 | VH domain | QIQLVQSGAEVKKPGASVKFSCKTSGYTFTNYYMVWVRQAPGQG |
| | | amino | LEWMGIIKPSGGNTIYAQNFQGRVTMTRDTSTNTVYMDLRSLRS |
| | | acid | EDTAVYYCARTGDRAFDVWGQGTMVTVSS |
| | | sequence | |
| 1706 | YANG-2252 | HCDR1 | GYTFTNYY |
| 1707 | YANG-2252 | HCDR2 | IKPSGGNT |
| 1708 | YANG-2252 | HCDR3 | ARTGDRAFDV |
| 1709 | YANG-2252 | VL domain | CAGTCTGTGTTGACGCAGTCGCCCTCAGTGTCTGCGGCCCCAGG |
| | | nucleic | ACAGAAGGTCACCATCTCCTGCTCTGGAAGCAGCTCCAACATTG |
| | | acid | GGAATAATTTTGTATCCTGGTACCAGCAGTTCCCAGGAACAGCC |
| | | sequence | CCCAAACTCCTCATTTATGACAATAATAAGCGACCCTCAGGGAT |
| | | | TCCTGACCGATTCTCTGGCTCCAAGTCTGGCACGTCAGCCACCC |
| | | | TGGGCATCACCGGACTCCAGACTGGGGACGAGGCCGATTATTAC |
| | | | TGCGGAACATGGGATAGCAGCCTGGGTGCTGGGGTGTTCGGCGG |
| | | | AGGGACCAAGCTGACCGTCCTA |
| 1710 | YANG-2252 | VL domain | QSVLTQSPSVSAAPGQKVTISCSGSSSNIGNNFVSWYQQFPGTA |
| | | amino | PKLLIYDNNKRPSGIPDRFSGSKSGTSATLGITGLQTGDEADYY |
| | | acid | CGTWDSSLGAGVFGGGTKLTVL |
| | | sequence | |
| 1711 | YANG-2252 | LCDR1 | SSNIGNNE |
| 1712 | YANG-2252 | LCDR2 | DNN |
| 1713 | YANG-2252 | LCDR3 | GTWDSSLGAGV |
| 1714 | YANG-2253 | VH domain | CAGATGCAATTGGTGCAGTCTGGGGCTGAGGTGAAGAAGCCTGG |
| | | nucleic | GGCCTCACTGAGGATTTCCTGCAAGACATCTGGATACACCTTCA |
| | | acid | CCAACTACTATATGGTCTGGGTGCGACAGGCCCCTGGACAAGGA |
| | | sequence | CTTGAGTGGATGGGCATAATCAAACCTAGTGGTGGTAACACGAT |
| | | | CTACGCACAGAAGTTCCAGGGCAGAGTCACCTTGACCAGGGACA |
| | | | CGTCCACGAACACAGTCTATTTGGACCTGAACAGTCTGAGATCT |
| | | | GAGGACACGGCCATGTATTATTGTGCGAGAACTGGGGATAGGGC |
| | | | CTTTGATGTCTGGGGCCACGGGACAATGGTCACCGTCTCTTCA |
| 1715 | YANG-2253 | VH domain | QMQLVQSGAEVKKPGASLRISCKTSGYTFTNYYMVWVRQAPGQG |
| | | amino | LEWMGIIKPSGGNTIYAQKFQGRVTLTRDTSTNTVYLDLNSLRS |
| | | acid | EDTAMYYCARTGDRAFDVWGHGTMVTVSS |
| | | sequence | |
| 1716 | YANG-2253 | HCDR1 | GYTFTNYY |
| 1717 | YANG-2253 | HCDR2 | IKPSGGNT |
| 1718 | YANG-2253 | HCDR3 | ARTGDRAFDV |
| 1719 | YANG-2253 | VL domain | CAGTCTGTGTTGACGCAGCCGCCCTCAGTGTCTGCGGCCCCAGG |
| | | nucleic | ACAGAAGGTCACCATCTCCTGCTCTGGAAGCAGCTCCAACATTG |
| | | acid | GGAATAATTATGTTTCCTGGTACCAACAGTTCCCAGGAACAGCC |
| | | sequence | CCCAAACTCCTCATTTATGACAATAATAAGCGACCCTCAGGGAT |
| | | | TCCTGACCGAGTCTCTGGCTCCAAGTCTGGCACGTCAGCCACCC |
| | | | TGGGCATCACCGGACTCCAGACTGGGGACGAGGCCGATTATTAC |
| | | | TGCGGAACATGGGATAGCAGCCTGGGTGCTGGGGTGTTCGGCGG |
| | | | AGGGACCAAGCTGACCGTCCTA |
| 1720 | YANG-2253 | VL domain | QSVLTQPPSVSAAPGQKVTISCSGSSSNIGNNYVSWYQQFPGTA |
| | | amino | PKLLIYDNNKRPSGIPDRVSGSKSGTSATLGITGLQTGDEADYY |
| | | acid | CGTWDSSLGAGVFGGGTKLTVL |
| | | sequence | |
| 1721 | YANG-2253 | LCDR1 | SSNIGNNY |
| 1722 | YANG-2253 | LCDR2 | DNN |
| 1723 | YANG-2253 | LCDR3 | GTWDSSLGAGV |
| 1724 | YANG-2254 | VH domain | CAGATGCAGTTGGTGCAGTCTGGGGCTGAGGTGAAGAAGCCTGG |
| | | nucleic | GGCCTCAGTGAAATTTTCCTGCAAGACATCTGGATACACCTTCA |
| | | acid | CCAACTACTATATGGTCTGGGTGCGACAGGCCCCTGGACAAGGA |
| | | sequence | CTTGAGTGGATGGGCATAATCAAACCTAGTGGTGGTAACACAAT |
| | | | CTACGCACAGAAGTTCCAGGGCAGAGTCACCATGACCAGGGACA |
| | | | CGTCCACGAACACAGTCTACATGGACCTGAACAGTCTGACATCT |
| | | | GAGGACACGGCCGTATATTATTGTGCGAGAACTGGGAATAGGGC |
| | | | TTTTGATGTCTGGGGCCACGGGACAATGGTCACCGTCTCTTCA |
| 1725 | YANG-2254 | VH domain | QMQLVQSGAEVKKPGASVKFSCKTSGYTFTNYYMVWVRQAPGQG |
| | | amino | LEWMGIIKPSGGNTIYAQKFQGRVTMTRDTSTNTVYMDLNSLTS |
| | | acid | EDTAVYYCARTGNRAFDVWGHGTMVTVSS |
| | | sequence | |
| 1726 | YANG-2254 | HCDR1 | GYTFTNYY |
| 1727 | YANG-2254 | HCDR2 | IKPSGGNT |
| 1728 | YANG-2254 | HCDR3 | ARTGNRAFDV |
| 1729 | YANG-2254 | VL domain | CAGTCTGTGTTGACGCAGCCGCCCTCAGTGTCTGCGGCCCCAGG |
| | | nucleic | ACAGAAGGTCACCATCTCCTGCTCTGGAAGCAGCTCCAATATTG |
| | | acid | GGAATAATTTTGTTTCCTGGTACCAGCAGTTTCCAGGAACAGCC |
| | | sequence | CCCAAACTCCTCATTTATGACAATTCTAAGCGACCCTCAGGGAT |
| | | | TCCTGACCGATTCTCTGGCTCCAAGTCTGGCACGTCAGCCACCC |
| | | | TGGGCATCACCGGACTCCAGACTGGGGACGAGGCCGATTATTAC |
| | | | TGCGGAACATGGGATAGCAGCCTGGGTGCTGGGGTGTTCGGCGG |
| | | | AGGGACCAAACTGACCGTCCTA |
| 1730 | YANG-2254 | VL domain | QSVLTQPPSVSAAPGQKVTISCSGSSSNIGNNFVSWYQQFPGTA |
| | | amino | PKLLIYDNSKRPSGIPDRFSGSKSGTSATLGITGLQTGDEADYY |
| | | acid | CGTWDSSLGAGVFGGGTKLTVL |
| | | sequence | |
| 1731 | YANG-2254 | LCDR1 | SSNIGNNF |
| 1732 | YANG-2254 | LCDR2 | DNS |
| 1733 | YANG-2254 | LCDR3 | GTWDSSLGAGV |
| 1734 | YANG-2255 | VH domain | CAGATGCAATTGGTGCAATCTGGGGCTGAGGTGAAGAAGCCTGG |
| | | nucleic | GGCCTCAGTGAAGATTTCCTGCAAGACATCTGGATACACCTTCA |
| | | acid | CCAACTACTATATGGTCTGGGTGCGACAGGCCCCTGGACAAGGA |
| | | sequence | CTTGAGTGGATGGGCATAATCAAACCTAGTGGTGGTAACACGAT |
| | | | CTACACACAGAAGTTCCAGGGCAGAGTCACCATGACCAGGGACA |
| | | | CGTCCACGAACACAGTCTATTTGGACCTGAGCAGTCTGAGATCT |
| | | | GACGACACGGCCGTCTATTATTGTGCGAGAACTGGGGATAGGGC |
| | | | TTTTGATGTCTGGGGCCACGGGACAATGGTCACCGTCTCTTCA |
| 1735 | YANG-2255 | VH domain | QMQLVQSGAEVKKPGASVKISCKTSGYTFTNYYMVWVRQAPGQG |
| | | amino | LEWMGIIKPSGGNTIYTQKFQGRVTMTRDTSTNTVYLDLSSLRS |
| | | acid | DDTAVYYCARTGDRAFDVWGHGTMVTVSS |
| | | sequence | |
| 1736 | YANG-2255 | HCDR1 | GYTFTNYY |
| 1737 | YANG-2255 | HCDR2 | IKPSGGNT |
| 1738 | YANG-2255 | HCDR3 | ARTGDRAFDV |
| 1739 | YANG-2255 | VL domain | CAGTCTGTGTTGACGCAGCCGCCCTCAGTGTCTGCGGCCCCAGG |
| | | nucleic | ACAGAAGGTCACCATCTCCTGCTCTGGAAGCAGCTCCAACATTG |
| | | acid | GGAATAATTTTGTTTCCTGGTACCAGCAGTTCCCAGGAACAGCC |
| | | sequence | CCCAAACTCCTCATTTATGACAATAATAAGCGACCCTCAGGGAT |
| | | | TCCTGACCGATTCTCTGGCTCCAAGTCTGGCACGTCAGCCACCC |
| | | | TGGGCATCACCGGACTCCAGACTGGGGACGAGGCCGATTATTAC |
| | | | TGCGGAACATGGGATAGCAGCCTGGGTACTGGGGTGTTCGGCGG |
| | | | AGGGACCAAGCTGACCGTCCTA |
| 1740 | YANG-2255 | VL domain | QSVLTQPPSVSAAPGQKVTISCSGSSSNIGNNFVSWYQQFPGTA |
| | | amino | PKLLIYDNNKRPSGIPDRFSGSKSGTSATLGITGLQTGDEADYY |
| | | acid | CGTWDSSLGTGVFGGGTKLTVL |
| | | sequence | |
| 1741 | YANG-2255 | LCDR1 | SSNIGNNE |
| 1742 | YANG-2255 | LCDR2 | DNN |
| 1743 | YANG-2255 | LCDR3 | GTWDSSLGTGV |
| 1744 | YANG-2256 | VH domain | CAGATACAGTTGGTGCAGTCTGGGGCTGAGGTGAAGAAGCCTGG |
| | | nucleic | GGCCTCAGTGAAGCTTTCCTGCAAGACATCTGGATACACCTTCA |
| | | acid | CCAGCTACTATATGGTCTGGGTGCGACAGGCCCCTGGACAAGGA |
| | | sequence | CTTGAGTGGATGGGCATAATCAAACCTAGTGGTGGTAACACAAT |
| | | | CTACGCACAGCAGTTCCAGGGCAGAGCCACCATGACCAGGGACA |
| | | | CGTCCACGAACACAGTCTACATGGACCTGAGCAGTCTGAGATCT |
| | | | GAGGACACGGCCGTTTATTATTGTGCGAGAACTGGGGATAGGGC |
| | | | TTTTGATGTCTGGGGCCACGGGACACTGGTCACCGTCTCTTCA |
| 1745 | YANG-2256 | VH domain | QIQLVQSGAEVKKPGASVKLSCKTSGYTFTSYYMVWVRQAPGQG |
| | | amino | LEWMGIIKPSGGNTIYAQQFQGRATMTRDTSTNTVYMDLSSLRS |
| | | acid | EDTAVYYCARTGDRAFDVWGHGTLVTVSS |
| | | sequence | |
| 1746 | YANG-2256 | HCDR1 | GYTFTSYY |
| 1747 | YANG-2256 | HCDR2 | IKPSGGNT |
| 1748 | YANG-2256 | HCDR3 | ARTGDRAFDV |
| 1749 | YANG-2256 | VL domain | CAGTCTGTGTTGACGCAGCCGCCCTCAGTGTCTGCGGCCCCAGG |
| | | nucleic | ACAGAAGATCACCATCTCCTGCTCTGGAAGCAGCTCCAACATTG |
| | | acid | GAAATAATTTTGTATCCTGGTACCAGCAGTTCCCAGGAACAGCC |
| | | sequence | CCCAAACTCCTCATTTATGACAATAATAAGCGACCCTCAGGGAC |
| | | | TCCTGACCGATTCTCTGGCTCCAAGTCTGGCGCGTCAGCCACCC |
| | | | TGGGCATCACCGGACTCCAGACTGGGGACGAGGCCGATTATTAC |
| | | | TGCGGAACATGGGATAGCAGCCTGGGTGCTGGGGTGTTCGGCGG |
| | | | AGGGACCAAGCTGACCGTCCTG |
| 1750 | YANG-2256 | VL domain | QSVLTQPPSVSAAPGQKITISCSGSSSNIGNNFVSWYQQFPGTA |
| | | amino | PKLLIYDNNKRPSGTPDRFSGSKSGASATLGITGLQTGDEADYY |
| | | acid | CGTWDSSLGAGVFGGGTKLTVL |
| | | sequence | |
| 1751 | YANG-2256 | LCDR1 | SSNIGNNE |
| 1752 | YANG-2256 | LCDR2 | DNN |
| 1753 | YANG-2256 | LCDR3 | GTWDSSLGAGV |
| 1754 | YANG-2257 | VH domain | CAGATACAGTTGGTGCAGTCTGGGGCTGAGGTGAAGGAGCCTGG |
| | | nucleic | GGCCTCAGTGAAGTTTTCCTGCAAGACATCTGGATACACCTTCA |
| | | acid | CCAGCTACTATATGGTCTGGGTGCGACAGGCCCCTGGACAAGGA |
| | | sequence | CTTGAGTGGATGGGCATAATCAAATCTAGTGGTGGTGACACAAT |
| | | | CTACGCACAGAAGTTCCAGGGCCGAGTCACCATGACCAGGGACA |
| | | | CGTCCACGCACACAGTCTACATGGACCTGAACAGTCTGACATAT |
| | | | GAAGACACGGCCGTATATTATTGTGCGAGAAGTGGGAATAGGGC |
| | | | TTTTGATGTCTGGGGCCATGGGACAATGGTCACCGTCTCTTCA |
| 1755 | YANG-2257 | VH domain | QIQLVQSGAEVKEPGASVKFSCKTSGYTFTSYYMVWVRQAPGQG |
| | | amino | LEWMGIIKSSGGDTIYAQKFQGRVTMTRDTSTHTVYMDLNSLTY |
| | | acid | EDTAVYYCARSGNRAFDVWGHGTMVTVSS |
| | | sequence | |
| 1756 | YANG-2257 | HCDR1 | GYTFTSYY |
| 1757 | YANG-2257 | HCDR2 | IKSSGGDT |
| 1758 | YANG-2257 | HCDR3 | ARSGNRAFDV |
| 1759 | YANG-2257 | VL domain | CAGTCTGTGTTGACGCAGCCGCCCTCAGTGTCTGCGGCCCCAGG |
| | | nucleic | ACAGAAGGTCACCATCTCCTGCTCTGGAAGCAGCTCCAACATTG |
| | | acid | GGAATAATTTTGTATCCTGGTACCAACAGTTCCCAGGAACAGCC |
| | | sequence | CCCAAACTCCTCATTTATGACAATACTAAGCGACCCTCAGGGAT |
| | | | TCCTGACCGATTCTCTGGCTCCAAGTCTGGCACGTCAGCCACCC |
| | | | TGGGCATCACCGGACTCCAGACTGGGGACGAGGCCGATTATTAC |
| | | | TGCGGAACATGGGATAGCAGCCTGGGTGCTGGGGTGTTCGGCGG |
| | | | AGGGACCAAGCTGACCGTCCTA |
| 1760 | YANG-2257 | VL domain | QSVLTQPPSVSAAPGQKVTISCSGSSSNIGNNFVSWYQQFPGTA |
| | | amino | PKLLIYDNTKRPSGIPDRFSGSKSGTSATLGITGLQTGDEADYY |
| | | acid | CGTWDSSLGAGVFGGGTKLTVL |
| | | sequence | |
| 1761 | YANG-2257 | LCDR1 | SSNIGNNE |
| 1762 | YANG-2257 | LCDR2 | DNT |
| 1763 | YANG-2257 | LCDR3 | GTWDSSLGAGV |
| 1764 | YANG-2258 | VH domain | CAGATGCAATTGGTGCAGTCTGGGGCTGAGGTGAAGAAGCCTGG |
| | | nucleic | GGCCTCAGTGAAGATTTCCTGCAAGACATCTGGATACACCTTCA |
| | | acid | CCAACTACTATATGGTCTGGGTGCGACAGGCCCCTGGACAAGGA |
| | | sequence | CTTGAGTGGATGGGCATAATCAAACCTAGTGGCGGTAACACGAT |
| | | | CTACGCACAGAAGTTCCAGGGCAGAGTCACCATGACCCGGGACA |
| | | | CGTCCACGAACACAGTCTATTTGGACCTGAGCAGTCTGAGATCT |
| | | | GAGGATACGGCCGTGTATTATTGTGCGAGAACTGGGGATAGGGC |
| | | | TTTTGATGTCTGGGGCCACGGGACAATGGTCACCGTCTCTTCA |
| 1765 | YANG-2258 | VH domain | QMQLVQSGAEVKKPGASVKISCKTSGYTFTNYYMVWVRQAPGQG |
| | | amino | LEWMGIIKPSGGNTIYAQKFQGRVTMTRDTSTNTVYLDLSSLRS |
| | | acid | EDTAVYYCARTGDRAFDVWGHGTMVTVSS |
| | | sequence | |
| 1766 | YANG-2258 | HCDR1 | GYTFTNYY |
| 1767 | YANG-2258 | HCDR2 | IKPSGGNT |
| 1768 | YANG-2258 | HCDR3 | ARTGDRAFDV |
| 1769 | YANG-2258 | VL domain | CAGTCTGTGTTGACGCAGCCGCCCTCAGTGTCTGCGGCCCCAGG |
| | | nucleic | ACAGAAGGTCACCATCTCCTGCTCTGGAAGCAGCTCCAACATTG |
| | | acid | GGAATAATTATGTTTCCTGGTACCAGCAGTTCCCAGGAACAGCC |
| | | sequence | CCCAAACTCCTCATTTATGACAATAATAAGCGACCCTCAGGGAT |
| | | | TCCTGACCGATTCTCTGGCTCCAAGTCTGGCACGTCAGCCACCC |
| | | | TGGGCATCACCGGACTCCAGACTGGGGACGAGGCCGATTATTAC |
| | | | TGCGTAACATGGGATAGCAGCCTGGGTGCTGGGGTGTTCGGCGG |
| | | | AGGGACCAAGCTGACCGTCCTA |
| 1770 | YANG-2258 | VL domain | QSVLTQPPSVSAAPGQKVTISCSGSSSNIGNNYVSWYQQFPGTA |
| | | amino | PKLLIYDNNKRPSGIPDRFSGSKSGTSATLGITGLQTGDEADYY |
| | | acid | CVTWDSSLGAGVFGGGTKLTVL |
| | | sequence | |
| 1771 | YANG-2258 | LCDR1 | SSNIGNNY |
| 1772 | YANG-2258 | LCDR2 | DNN |
| 1773 | YANG-2258 | LCDR3 | VTWDSSLGAGV |
| 1774 | YANG-2259 | VH domain | CAGATGCAATTGGTGCAATCTGGGGCTGAGGTGAAGAAGCCTGG |
| | | nucleic | GGCCTCAGTGAAGATTTCCTGCAAGACATCTGGATACACCTTCA |
| | | acid | CCAACTACTATATGGTCTGGGTGCGACAGGCCCCTGGACAAGGA |
| | | sequence | CTTGAGTGGATGGGCATAATCAAACCTAGTGGTGGTAACACGAT |
| | | | CTACGCACAGAAGTTCCAGGGCAGAGTCACCATGACCAGGGACA |
| | | | CGTCCACGAATAAAGTCTATTTGGACCTGAGCAGTCTGAGATCT |
| | | | GAGGACACGGCCGTCTATTATTGTGCCAGAACTGGGGATAGGGC |
| | | | TTTTGATGTCTGGGGCCAGGGGACAATGGTCACCGTCTCTTCA |
| 1775 | YANG-2259 | VH domain | QMQLVQSGAEVKKPGASVKISCKTSGYTFTNYYMVWVRQAPGQG |
| | | amino | LEWMGIIKPSGGNTIYAQKFQGRVTMTRDTSTNKVYLDLSSLRS |
| | | acid | EDTAVYYCARTGDRAFDVWGQGTMVTVSS |
| | | sequence | |
| 1776 | YANG-2259 | HCDR1 | GYTFTNYY |
| 1777 | YANG-2259 | HCDR2 | IKPSGGNT |
| 1778 | YANG-2259 | HCDR3 | ARTGDRAFDV |
| 1779 | YANG-2259 | VL domain | CAGTCTGTGTTGACGCAGCCGCCCTCAGTGTCTGCGGCCCCAGG |
| | | nucleic | ACAGAAGGTCACCATCTCCTGCTCTGGAAGCAGCTCCAACATTG |
| | | acid | GGAATAATTTTGTTTCCTGGTACCAGCAGTTCCCAGGAACAGCC |
| | | sequence | CCCAAACTCCTCATTTATGACAATAATAAACGACCCTCAGGGAT |
| | | | TCCTGACCGATTCTCTGGCTCCAAGTCTGGCACGTCAGCCACCC |
| | | | TGGGCATCACCGGACTCCAGACTGGGGACGAGGCCGATTATTAC |
| | | | TGCGGAACATGGGATAGCAGCCTGGGTGCTGGGGTGTTCGGCGG |
| | | | AGGGACCAAGCTGACCGTCCTA |
| 1780 | YANG-2259 | VL domain | QSVLTQPPSVSAAPGQKVTISCSGSSSNIGNNFVSWYQQFPGTA |
| | | amino | PKLLIYDNNKRPSGIPDRFSGSKSGTSATLGITGLQTGDEADYY |
| | | acid | CGTWDSSLGAGVFGGGTKLTVL |
| | | sequence | |
| 1781 | YANG-2259 | LCDR1 | SSNIGNNF |
| 1782 | YANG-2259 | LCDR2 | DNN |
| 1783 | YANG-2259 | LCDR3 | GTWDSSLGAGV |
| 1784 | YANG-2260 | VH domain | CAGATGCAGTTGGTGCAGTCTGGGGCTGAGGTGAAGAAGCCTGG |
| | | nucleic | GGCCTCAGTGAAGATTTCCTGCAAGACATCTGGATACACCTTCA |
| | | acid | TCAACTACTATATGGTCTGGGTGCGACAGGCCCCTGGACAAGGA |
| | | sequence | CTTGAGTGGATGGGCATAATCAAACCTAGTGGTGGTAACACGAT |
| | | | CTACGCACAGAAGTTCCAGGGCAGAGTCACCATGACCAGGGACA |
| | | | CGTCCACGAACACAGTCTATATGGACCTGAGCAGTCTGAGATCT |
| | | | GAGGACACGGCCGTGTATTATTGTGCGAGAATTGGGGATAGGGC |
| | | | TTTTGATGTCTGGGGCCACGGGACAATGGTCACCGTCTCTTCA |
| 1785 | YANG-2260 | VH domain | QMQLVQSGAEVKKPGASVKISCKTSGYTFINYYMVWVRQAPGQG |
| | | amino | LEWMGIIKPSGGNTIYAQKFQGRVTMTRDTSTNTVYMDLSSLRS |
| | | acid | EDTAVYYCARIGDRAFDVWGHGTMVTVSS |
| | | sequence | |
| 1786 | YANG-2260 | HCDR1 | GYTFINYY |
| 1787 | YANG-2260 | HCDR2 | IKPSGGNT |
| 1788 | YANG-2260 | HCDR3 | ARIGDRAFDV |
| 1789 | YANG-2260 | VL domain | CAGTCTGTGTTGACGCAGCCGCCCTCAGTGTCTGCGGCCCCAGG |
| | | nucleic | ACAGAAGGTCACCATCTCCTGCTCTGGAAGCAGCTCCAACATTG |
| | | acid | GGAATAACTTTGTTTCCTGGTACCAGCAGTTCCCAGGAACAGCC |
| | | sequence | CCCAAGCTCCTCATTTATGACAATCATAAGCGACCCTCAGGGAT |
| | | | TCCTGACCGATTCTCTGCCTCCAAGTCTGGCACGTCAGCCACCC |
| | | | TGGGCATCACCGGACTCCAGACTGGGGACGAGGCCGATTATTAC |
| | | | TGCGGAACATGGGATAGCGGCCTGGGTGCTGGGGTGTTCGGCGG |
| | | | AGGGACCAAGCTGACCGTCCTA |
| 1790 | YANG-2260 | VL domain | QSVLTQPPSVSAAPGQKVTISCSGSSSNIGNNFVSWYQQFPGTA |
| | | amino | PKLLIYDNHKRPSGIPDRFSASKSGTSATLGITGLQTGDEADYY |
| | | acid | CGTWDSGLGAGVFGGGTKLTVL |
| | | sequence | |
| 1791 | YANG-2260 | LCDR1 | SSNIGNNE |
| 1792 | YANG-2260 | LCDR2 | DNH |
| 1793 | YANG-2260 | LCDR3 | GTWDSGLGAGV |
| 1794 | YANG-2261 | VH domain | CAGATTCAATTGGTGCAGTCTGGGGCTGAGGTGAAGAAGCCTGG |
| | | nucleic | GGCCTCAGTGAAGATTTCCTGCAAGACATCTGGATACACCTTCA |
| | | acid | CCAACTACTATATGGTCTGGGTGCGACAGGCCCCTGGACAAGGA |
| | | sequence | CTTGAGTGGATGGGCATAATCAAACCTAGTAATGGTAACACGAT |
| | | | CTACGCACAGAAGTTCCAGGGCAGAGTCACCATGACCAGGGACA |
| | | | CGTCCACGAATATAGTCTATTTGGACCTGAGCAGTCTGAGATCT |
| | | | GAGGACACGGCCGTGTATTATTGTGCGAGAACTGGGGATAGGGC |
| | | | TTTTGATGTCTGGGGCCACGGGACAATGGTCACCGTCTCTTCA |
| 1795 | YANG-2261 | VH domain | QIQLVQSGAEVKKPGASVKISCKTSGYTFTNYYMVWVRQAPGQG |
| | | amino | LEWMGIIKPSNGNTIYAQKFQGRVTMTRDTSTNIVYLDLSSLRS |
| | | acid | EDTAVYYCARTGDRAFDVWGHGTMVTVSS |
| | | sequence | |
| 1796 | YANG-2261 | HCDR1 | GYTFTNYY |
| 1797 | YANG-2261 | HCDR2 | IKPSNGNT |
| 1798 | YANG-2261 | HCDR3 | ARTGDRAFDV |
| 1799 | YANG-2261 | VL domain | CAGTCTGTGTTGACGCAGCCGCCCTCAGTGTCTGCGGCCCCAGG |
| | | nucleic | ACAGAAGGTCACCATCTCCTGCTCTGGAAGCAGCTCCAATATTG |
| | | acid | GGAATAATTATGTTTCCTGGTACCAGCAGTTCCCAGGAACAGTC |
| | | sequence | CCCAAACTCCTCATTTATGACAATAATAAGCGACCCTCAGGGAT |
| | | | TCCTGACCGATTCTCTGGCTCCAAGTCTGGCACGTCAGCCACCC |
| | | | TGGGCATCACCGGACTCCAGACTGGGGACGAGGCCGAATATTAC |
| | | | TGCGGAACATGGGATAGCAGCCTGGGTGCTGGGGTGTTCGGCGG |
| | | | AGGGACCAAGCTGACCGTCCTA |
| 1800 | YANG-2261 | VL domain | QSVLTQPPSVSAAPGQKVTISCSGSSSNIGNNYVSWYQQFPGTV |
| | | amino | PKLLIYDNNKRPSGIPDRESGSKSGTSATLGITGLQTGDEAEYY |
| | | acid | CGTWDSSLGAGVFGGGTKLTVL |
| | | sequence | |
| 1801 | YANG-2261 | LCDR1 | SSNIGNNY |
| 1802 | YANG-2261 | LCDR2 | DNN |
| 1803 | YANG-2261 | LCDR3 | GTWDSSLGAGV |
| 1804 | YANG-2262 | VH domain | CAGATACAGCTGGTGCAGTCTGGGGCTGAGGTGAAGAAGCCTGG |
| | | nucleic | GGCCTCAGTGAGGTTTTCCTGCAAGACATCTGGATACACCTTCA |
| | | acid | CCAACTACTACATGGTCTGGGTGCGACAGGCCCCTGGACAAGGA |
| | | sequence | CTTGAGTGGATGGGCATAATCAAACCTAGTGGTGGTGACACAAT |
| | | | CTACGCACAGAACTTCCAGGGCAGAGTCACCATGACCAGGGACA |
| | | | CGTCCACGAACTCAGTCTATATGGACCTGAGGAGTCTGAGATCT |
| | | | GAGGACACGGCCGTGTATTATTGTGCGAGAACTGGTGATAGGGC |
| | | | TTTTGATGTCTGGGGCCAAGGGACAATGGTCACCGTCTCTTCA |
| 1805 | YANG-2262 | VH domain | QIQLVQSGAEVKKPGASVRFSCKTSGYTFTNYYMVWVRQAPGQG |
| | | amino | LEWMGIIKPSGGDTIYAQNFQGRVTMTRDTSTNSVYMDLRSLRS |
| | | acid | EDTAVYYCARTGDRAFDVWGQGTMVTVSS |
| | | sequence | |
| 1806 | YANG-2262 | HCDR1 | GYTFTNYY |
| 1807 | YANG-2262 | HCDR2 | IKPSGGDT |
| 1808 | YANG-2262 | HCDR3 | ARTGDRAFDV |
| 1809 | YANG-2262 | VL domain | CAGTCTGTGTTGACGCAGCCGCCCTCAGTGTCTGCGGCCCCAGG |
| | | nucleic | ACAGAAGGTCACCATCTCCTGCTCTGGACGCAGCTCCAACATTG |
| | | acid | GGAATAATTTTGTATCCTGGTACCAGCAGTTCCCAGGAACAGCC |
| | | sequence | CCCAAACTCCTCATTTATGACAATAATAAACGACCCTCAGGGAT |
| | | | TCCTGACCGATTCTCTGGCTCCAAGTCTGGCACGTCAGCCACCC |
| | | | TGGGCATCACCGGGCTCCAGACTGGGGACGAGGCCGATTATTAC |
| | | | TGCGGAACATGGGATAGCAGCCTGGGTGCTGGGGTGTTCGGCGG |
| | | | AGGGACCAAGCTGACCGTCCTA |
| 1810 | YANG-2262 | VL domain | QSVLTQPPSVSAAPGQKVTISCSGRSSNIGNNFVSWYQQFPGTA |
| | | amino | PKLLIYDNNKRPSGIPDRFSGSKSGTSATLGITGLQTGDEADYY |
| | | acid | CGTWDSSLGAGVFGGGTKLTVL |
| | | sequence | |
| 1811 | YANG-2262 | LCDR1 | SSNIGNNE |
| 1812 | YANG-2262 | LCDR2 | DNN |
| 1813 | YANG-2262 | LCDR3 | GTWDSSLGAGV |
| 1814 | YANG-2263 | VH domain | CAGATGCAATTGGTGCAGTCTGGGGCTGAGGTGAAGAAGCCTGG |
| | | nucleic | GGCCTCAGTGAAGATTTCCTGCAAGACATCTGGATTCACCTTCG |
| | | acid | CCAACTACTATGTGGTCTGGGTGCGACAGGCCCCTGGACAAGGA |
| | | sequence | CTTGAGTGGATGGGCATAATCAAACCTAGTGGTGGTAACACGAT |
| | | | CTACGCACAGAAGTTCCAGGGCAGAGTCACCATGACCAGGGACA |
| | | | CGTCCACGAACACAGTCTATTTGGACTTGAGCAGTCTGAGATCT |
| | | | GAGGACACGGCCGTGTATTATTGTGCGAGAACTGGTGATAGGGC |
| | | | TTTTGATGTCTGGGGCCACGGGACAGTGGTCACCGTCTCTTCA |
| 1815 | YANG-2263 | VH domain | QMQLVQSGAEVKKPGASVKISCKTSGFTFANYYVVWVRQAPGQG |
| | | amino | LEWMGIIKPSGGNTIYAQKFQGRVTMTRDTSTNTVYLDLSSLRS |
| | | acid | EDTAVYYCARTGDRAFDVWGHGTVVTVSS |
| | | sequence | |
| 1816 | YANG-2263 | HCDR1 | GFTFANYY |
| 1817 | YANG-2263 | HCDR2 | IKPSGGNT |
| 1818 | YANG-2263 | HCDR3 | ARTGDRAFDV |
| 1819 | YANG-2263 | VL domain | CAGTCTGTGTTGACGCAGCCGCCCTCAGTGTCTGCGGCCCCAGG |
| | | nucleic | ACAGAAGGTCACCATCTCCTGCTCTGGAAGCAGCTCCAACATTG |
| | | acid | GGAATAATTATGTTTCCTGGTACCAGCAGTTCCCAGGAACAGCC |
| | | sequence | CCCAAACTCCTCATCTATGACAATAATAAGCGACCCTCAGGGAT |
| | | | TCCTGACCGATTCTCTGGCTCCAAGTCTGGCACGTCAGCCACCC |
| | | | TGGGCATCACCGGACTCCAGACTGGGGACGAGGCCGATTATTAC |
| | | | TGCGGAACATGGGATAGCAGCCTGGGTGCTGGGGTGTTCGGCGG |
| | | | AGGGACCAAGCTGACCGTCCTA |
| 1820 | YANG-2263 | VL domain | QSVLTQPPSVSAAPGQKVTISCSGSSSNIGNNYVSWYQQFPGTA |
| | | amino | PKLLIYDNNKRPSGIPDRFSGSKSGTSATLGITGLQTGDEADYY |
| | | acid | CGTWDSSLGAGVFGGGTKLTVL |
| | | sequence | |
| 1821 | YANG-2263 | LCDR1 | SSNIGNNY |
| 1822 | YANG-2263 | LCDR2 | DNN |
| 1823 | YANG-2263 | LCDR3 | GTWDSSLGAGV |
| 1824 | YANG-2264 | VH domain | CAGATACAGTTGGTGCAGTCTGGGGCTGAGGTGAAGAAGCCTGG |
| | | nucleic | GGCCTCAGTGAAGCTTTCCTGCAAGACATCTGGATACACCTTCA |
| | | acid | CCAGCTACTACATGGTCTGGGTGCGACAGGCCCCTGGACAAGGG |
| | | sequence | CTTGAATGGATGGGCATAATCAAACCTAGTGGTGGTAACACAAT |
| | | | CTACGCACAGAAGTTCCAGGGCAGAGCCACCATGACCAGGGACA |
| | | | CGTCCACGAACACAGTCTACATGGACCTGAGCAGTCTGAGATCT |
| | | | GAAGACACGGCCGTGTATTATTGTGCGAGAACTGGGGATAGGGC |
| | | | TTTTGATGTCTGGGGCCACGGGACACTGGTCACCGTCTCTTCA |
| 1825 | YANG-2264 | VH domain | QIQLVQSGAEVKKPGASVKLSCKTSGYTFTSYYMVWVRQAPGQG |
| | | amino | LEWMGIIKPSGGNTIYAQKFQGRATMTRDTSTNTVYMDLSSLRS |
| | | acid | EDTAVYYCARTGDRAFDVWGHGTLVTVSS |
| | | sequence | |
| 1826 | YANG-2264 | HCDR1 | GYTFTSYY |
| 1827 | YANG-2264 | HCDR2 | IKPSGGNT |
| 1828 | YANG-2264 | HCDR3 | ARTGDRAFDV |
| 1829 | YANG-2264 | VL domain | CAGTCTGTGTTGACGCAGCCGCCCTCAGTGTCTGCGGCCCCAGG |
| | | nucleic | ACAGAAGGTCACCATCTCCTGCTCTGGAAGCAGCTCCAACATTG |
| | | acid | GGAATAATTATGTATCCTGGTACCAGCAGATCCCAGGAACAGCC |
| | | sequence | CCCAAACTCCTCATTTATGACAATAATAAGCGACCCTCAGGGAC |
| | | | TCCTGCCCGATCCTCTGGCTCCAAGTCTGGCGCGTCAGCCACCC |
| | | | TGGGCATCACCGGACTCCAGCCTGGGGACGAGGCCGATTATTAC |
| | | | TGCGGAACATGGGATAGCAGCCTGGGTGCTGGGGTGTTCGGCGG |
| | | | AGGGACCAAGCTGACCGTCCTG |
| 1830 | YANG-2264 | VL domain | QSVLTQPPSVSAAPGQKVTISCSGSSSNIGNNYVSWYQQIPGTA |
| | | amino | PKLLIYDNNKRPSGTPARSSGSKSGASATLGITGLQPGDEADYY |
| | | acid | CGTWDSSLGAGVFGGGTKLTVL |
| | | sequence | |
| 1831 | YANG-2264 | LCDR1 | SSNIGNNY |
| 1832 | YANG-2264 | LCDR2 | DNN |
| 1833 | YANG-2264 | LCDR3 | GTWDSSLGAGV |
| 1834 | YANG-2265 | VH domain | CAGATACAGCTGGTGCAGTCTGGGGCTGAGGTGAAGAAGCCTGG |
| | | nucleic | GGCCTCAGTGAACTTTTCCTGCAAGACATCTGGATACACCTTCA |
| | | acid | CCAACTACTATATGGTCTGGGTGCGACAGGCCCCTGGACAAGGA |
| | | sequence | CTTGAGTGGATGGGCATAATCAAACCTAGTGGTGGTAACACAAT |
| | | | CTACGCACAGAAGTTCCAGGGCAGAGTCACCATGACCAGGGACA |
| | | | CGTCCACGAACACAGTCTACATGGACCTGAGGAGTCTGCGATCT |
| | | | GAGGACACGGCCGTGTATTATTGTGCGAGAACTGGGGATAGGGC |
| | | | TTTTGATGTCTGGGGCCAAGGGACAATGGTCACCGTCTCTTCA |
| 1835 | YANG-2265 | VH domain | QIQLVQSGAEVKKPGASVNFSCKTSGYTFTNYYMVWVRQAPGQG |
| | | amino | LEWMGIIKPSGGNTIYAQKFQGRVTMTRDTSTNTVYMDLRSLRS |
| | | acid | EDTAVYYCARTGDRAFDVWGQGTMVTVSS |
| | | sequence | |
| 1836 | YANG-2265 | HCDR1 | GYTFTNYY |
| 1837 | YANG-2265 | HCDR2 | IKPSGGNT |
| 1838 | YANG-2265 | HCDR3 | ARTGDRAFDV |
| 1839 | YANG-2265 | VL domain | CAGTCTGTGTTGACGCAGCCGCCCTCAGTGTCTGCGGCCCCAGG |
| | | nucleic | ACAGAAGGTCACCATCTCCTGCTCTGGAAGCAGCTCCAACATTG |
| | | acid | GGAATAATTTTGTATCCTGGTACCAGCAGTTCCCAGGAACAGCC |
| | | sequence | CCCAAACTCCTCATTTATGACAATAATAAGCGACCCTCAGGGAT |
| | | | TCCTGACCGATTCTCTGGCTCCAAGTCTGGCACGTCAGCCACCC |
| | | | TGGGCATCACCGGACTCCAGACTGGGGACGAGGCCGATTATTAC |
| | | | TGCGGAACATGGGATAGCAGCCTGGGTGCTGGGGTGTTCGGCGG |
| | | | AGGGACCAAGCTGACCGTCCTA |
| 1840 | YANG-2265 | VL domain | QSVLTQPPSVSAAPGQKVTISCSGSSSNIGNNFVSWYQQFPGTA |
| | | amino | PKLLIYDNNKRPSGIPDRFSGSKSGTSATLGITGLQTGDEADYY |
| | | acid | CGTWDSSLGAGVFGGGTKLTVL |
| | | sequence | |
| 1841 | YANG-2265 | LCDR1 | SSNIGNNF |
| 1842 | YANG-2265 | LCDR2 | DNN |
| 1843 | YANG-2265 | LCDR3 | GTWDSSLGAGV |
| 1844 | YANG-2266 | VH domain | CAGATTCAGTTGGTGCAGTCTGGGGCTGAGGTGAAGAAGCCTGG |
| | | nucleic | GGCCTCAGTGAAGCTTTCCTGCAAGACATCTGGATACACCTTCA |
| | | acid | CCAACTACTATATGGTCTGGGTGCGACAGGCCCCTGGACAAGGA |
| | | sequence | CTTGAGTGGATGGGCATAATCAAACCTAGTGGTGGTAACACAAT |
| | | | CTACGCACAGAAGTTCCAGGGCAGAGTCACCATGACCAGGGACA |
| | | | CGTCCACGAACACAGTCTACATGGACCTGAACAGTCTGAGATCT |
| | | | GAGGACACGGCCGTCTATTATTGTGCGAGAACTGGAGATAGGGC |
| | | | TTTTGATGTCTGGGGCCACGGGACAATGGTCACCGTGTCTTCA |
| 1845 | YANG-2266 | VH domain | QIQLVQSGAEVKKPGASVKLSCKTSGYTFTNYYMVWVRQAPGQG |
| | | amino | LEWMGIIKPSGGNTIYAQKFQGRVTMTRDTSTNTVYMDLNSLRS |
| | | acid | EDTAVYYCARTGDRAFDVWGHGTMVTVSS |
| | | sequence | |
| 1846 | YANG-2266 | HCDR1 | GYTFTNYY |
| 1847 | YANG-2266 | HCDR2 | IKPSGGNT |
| 1848 | YANG-2266 | HCDR3 | ARTGDRAFDV |
| 1849 | YANG-2266 | VL domain | CAGTCTGTGTTGACGCAGCCGCCCTCAGTGTCTGCGGCCCCAGG |
| | | nucleic | ACAGAAGGTCACCATCTCCTGCTCTGGAAGCAGCTCCAATATTG |
| | | acid | GGAATAATTATGTATCCTGGTACCAACAGTTCCCAGGAACAGCC |
| | | sequence | CCCAAACTCCTCATTTATGACAATAATAAGCGACCCTCAGGGAT |
| | | | TCCTGACCGATTCTCTGGCTCCAAGTCTGGCACGTCAGCCACCC |
| | | | TGGGCATCACCGGACTCCAGACTGGGGACGAGGCCGATTATTAC |
| | | | TGCGGAACATGGGATAGCAGCCTGGGTGCTGGGGTGTTCGGCGG |
| | | | AGGGACCAAACTGACCGTCCTA |
| 1850 | YANG-2266 | VL domain | QSVLTQPPSVSAAPGQKVTISCSGSSSNIGNNYVSWYQQFPGTA |
| | | amino | PKLLIYDNNKRPSGIPDRFSGSKSGTSATLGITGLQTGDEADYY |
| | | acid | CGTWDSSLGAGVFGGGTKLTVL |
| | | sequence | |
| 1851 | YANG-2266 | LCDR1 | SSNIGNNY |
| 1852 | YANG-2266 | LCDR2 | DNN |
| 1853 | YANG-2266 | LCDR3 | GTWDSSLGAGV |
| 1854 | YANG-2267 | VH domain | CAGATGCAATTGGTGCAGTCTGGGGCTGAGGTGAAGAAGCCTGG |
| | | nucleic | GGCCTCAGTGAAGATTTTCTGCAAGACATCTGGATACCCCTTCA |
| | | acid | GCAACTACTATATGGTCTGGGTGCGACAGGCCCCTGGACAAGGA |
| | | sequence | CTTGAGTGGCTGGGCATAATCAAACCTAGTGGTGGTAACACGAT |
| | | | CTACGCACAGAAGTTCCAGGGCAGAGTCACCATGACCAGGGACA |
| | | | CGTCCACGAATACAGTCTATTTGGACCTGACCAGTCTGAGATCT |
| | | | GAGGACACGGCCGTGTATTATTGTGCGCGAACTGGGGATAGGGC |
| | | | TTTTGATGTCTGGGGCCACGGGACAATGGTCACCGTCTCTTCA |
| 1855 | YANG-2267 | VH domain | QMQLVQSGAEVKKPGASVKIFCKTSGYPFSNYYMVWVRQAPGQG |
| | | amino | LEWLGIIKPSGGNTIYAQKFQGRVTMTRDTSTNTVYLDLTSLRS |
| | | acid | EDTAVYYCARTGDRAFDVWGHGTMVTVSS |
| | | sequence | |
| 1856 | YANG-2267 | HCDR1 | GYPFSNYY |
| 1857 | YANG-2267 | HCDR2 | IKPSGGNT |
| 1858 | YANG-2267 | HCDR3 | ARTGDRAFDV |
| 1859 | YANG-2267 | VL domain | CAGTCTGTGTTGACGCAGCCGCCCTCAGTGTCTGCGGCCCCAGG |
| | | nucleic | ACAGAAGGTCACCATCTCCTGCTCTGGAAGCAGTTCCAACATTG |
| | | acid | GGAGTAATTATGTTTCCTGGTACCAGCAGTTCCCAGGAACAGCC |
| | | sequence | CCCAAACTCCTCATTTATGACAATAATAAGCGACCCTCAGGGAT |
| | | | TCCTGACCGATTCTCTGGCTCCAAGTCTGGCACGTCAGCCACCC |
| | | | TGGGCATCACCGGACTCCAGACTGGGGACGAGGCCGATTATTAC |
| | | | TGCGGAACATGGGATAGCAGCCTGGGTGCTGGGGTGTTCGGCGG |
| | | | AGGGACCAAGCTGACCGTCCTA |
| 1860 | YANG-2267 | VL domain | QSVLTQPPSVSAAPGQKVTISCSGSSSNIGSNYVSWYQQFPGTA |
| | | amino | PKLLIYDNNKRPSGIPDRFSGSKSGTSATLGITGLQTGDEADYY |
| | | acid | CGTWDSSLGAGVFGGGTKLTVL |
| | | sequence | |
| 1861 | YANG-2267 | LCDR1 | SSNIGSNY |
| 1862 | YANG-2267 | LCDR2 | DNN |
| 1863 | YANG-2267 | LCDR3 | GTWDSSLGAGV |
| 1864 | YANG-2268 | VH domain | CAGATACAACTGGTGCAGTCTGGGGCTGAGGTGAAGAAGCCTGG |
| | | nucleic | GGCCTCAGTGAGGTTTTCCTGCAAGACATCTGGATACACCTTCA |
| | | acid | CCAACTACTATATGGTCTGGGTGCGACAGGCCCCTGGACAAGGA |
| | | sequence | CTTGAGTGGATGGGCATAATCAAACCTAGTGGTGGTAACACCAT |
| | | | CTACGCACAGAACTTCCAGGGCAGAGTCACCATGACCAGGGACA |
| | | | CGTCCACGAGCACAGTCTACATGGACCTGAGGAGTCTGAGATCT |
| | | | GAGGACACGGCCGTGTATTATTGTGCGAGAACTGGTGATAGGGC |
| | | | TTTTGATGTCTGGGGCCAAGGGACAATGGTCACCGTCTCTTCA |
| 1865 | YANG-2268 | VH domain | QIQLVQSGAEVKKPGASVRFSCKTSGYTFTNYYMVWVRQAPGQG |
| | | amino | LEWMGIIKPSGGNTIYAQNFQGRVTMTRDTSTSTVYMDLRSLRS |
| | | acid | EDTAVYYCARTGDRAFDVWGQGTMVTVSS |
| | | sequence | |
| 1866 | YANG-2268 | HCDR1 | GYTFTNYY |
| 1867 | YANG-2268 | HCDR2 | IKPSGGNT |
| 1868 | YANG-2268 | HCDR3 | ARTGDRAFDV |
| 1869 | YANG-2268 | VL domain | CAGTCTGTCTTGACTCAGCCGCCCTCAGTGTCTGCTGCCCCAGG |
| | | nucleic | ACAGAAGGTCAACATCTCCTGCTCTGGAAGCAGCTCCAACATTG |
| | | acid | GGAATAATTTTGTATCCTGGTACCAGCAGTTCTCAGGAACCGCC |
| | | sequence | CCCAAACTCCTCATTTATGACAATAATAAGCGACCCTCAGGGAT |
| | | | TCCTGACCGATTCTCTGGCTCCAAGTCTGGCACGTCAGCCACCC |
| | | | TGGGCATCACCGGACTCCAGACTGGGGACGAGGCCGATTATTAC |
| | | | TGCGGAACATGGGATAGCAGCCTGGGTGCTGGGGTGTTCGGCGG |
| | | | AGGGACCAAGCTGACCGTCCTA |
| 1870 | YANG-2268 | VL domain | QSVLTQPPSVSAAPGQKVNISCSGSSSNIGNNFVSWYQQFSGTA |
| | | amino | PKLLIYDNNKRPSGIPDRFSGSKSGTSATLGITGLQTGDEADYY |
| | | acid | CGTWDSSLGAGVFGGGTKLTVL |
| | | sequence | |
| 1871 | YANG-2268 | LCDR1 | SSNIGNNE |
| 1872 | YANG-2268 | LCDR2 | DNN |
| 1873 | YANG-2268 | LCDR3 | GTWDSSLGAGV |
| 1874 | YANG-2269 | VH domain | CAGATGCAGTTGGTGCAGTCTGGGGCTGAGGTGAAGAAGCCTGG |
| | | nucleic | GGCCTCAGTGAAGATTTCCTGCAAGACATCTGGATATATCTTCA |
| | | acid | CCAAGTACTATATGGTCTGGGTGCGACAGGCCCCGGGACAAGGA |
| | | sequence | CTTGAGTGGATGGGCATAATCAAACCTAGTGGCGGTGACACGAT |
| | | | CTACGCACAGAAGTTCCAGGGCAGAGTCACCATGACCAGGGACA |
| | | | CGTCCACGAACACAGTCTATATGGACCTGAGCAGTCTGAGATCT |
| | | | GAGGACACGGCCGTGTATTATTGTGCGAGAACTGGAAATAGGGC |
| | | | TTTTGATGTCTGGGGCCACGGGACAATGGTCACCGTCTCTTCA |
| 1875 | YANG-2269 | VH domain | QMQLVQSGAEVKKPGASVKISCKTSGYIFTKYYMVWVRQAPGQG |
| | | amino | LEWMGIIKPSGGDTIYAQKFQGRVTMTRDTSTNTVYMDLSSLRS |
| | | acid | EDTAVYYCARTGNRAFDVWGHGTMVTVSS |
| | | sequence | |
| 1876 | YANG-2269 | HCDR1 | GYIFTKYY |
| 1877 | YANG-2269 | HCDR2 | IKPSGGDT |
| 1878 | YANG-2269 | HCDR3 | ARTGNRAFDV |
| 1879 | YANG-2269 | VL domain | CAGTCTGTGTTGACGCAGCCGCCCTCAGTGTCTGCGGCCCCAGG |
| | | nucleic | ACAGAAGGTCACCGTCTCCTGCTCTGGAAGCAGCTCCAACATTG |
| | | acid | GGAATAATTTTGTTTCCTGGTACCAGCAGTTCCCAGGAACAGCC |
| | | sequence | CCCAAACTCCTCATTTATGACAATAATAAGCGACCCTCAGGGAT |
| | | | TCCTGACCGATTCTCTGGCTCCAAGTCTGGCACGTCAGCCACCC |
| | | | TGGGCATCACCGGACTCCAGACTGGGGACGAGGCCGATTATTAC |
| | | | TGCGGAACATGGGATAGCAGCCTGGGTGCTGGGGTGTTCGGCGG |
| | | | AGGGACCAAGCTGGCCGTCCTT |
| 1880 | YANG-2269 | VL domain | QSVLTQPPSVSAAPGQKVTVSCSGSSSNIGNNFVSWYQQFPGTA |
| | | amino | PKLLIYDNNKRPSGIPDRFSGSKSGTSATLGITGLQTGDEADYY |
| | | acid | CGTWDSSLGAGVFGGGTKLAVL |
| | | sequence | |
| 1881 | YANG-2269 | LCDR1 | SSNIGNNF |
| 1882 | YANG-2269 | LCDR2 | DNN |
| 1883 | YANG-2269 | LCDR3 | GTWDSSLGAGV |
| 1884 | YANG-2270 | VH domain | CAGATTCAGTTGGTGCAGTCTGGGGCTGAGGTGAAGAAGCCTGG |
| | | nucleic | GGCCTCAGTGAGGTTTTCCTGCAAGACATCTGGATACACCTTCA |
| | | acid | CCAGCTACTATATGGTCTGGGTGCGACAGGCCCCTGGACAAGGA |
| | | sequence | CTTGAGTGGATGGGCATAATCAAACCTAGTGGTGGTAACACAAT |
| | | | CTACGCACAGAAGTTCCAGGGCAGAGTCACCATGACCAGGGACA |
| | | | CGTCCACGCACACAGTCTATATGGACCTGAGCAGTCTGAGATCT |
| | | | GAGGACACGGCCGTATATTATTGTGCGAGAACTGGTGATAGGGC |
| | | | TTTTGATGTCTGGGGCCACGGGACAATGATCACCGTCTCTTCA |
| 1885 | YANG-2270 | VH domain | QIQLVQSGAEVKKPGASVRFSCKTSGYTFTSYYMVWVRQAPGQG |
| | | amino | LEWMGIIKPSGGNTIYAQKFQGRVTMTRDTSTHTVYMDLSSLRS |
| | | acid | EDTAVYYCARTGDRAFDVWGHGTMITVSS |
| | | sequence | |
| 1886 | YANG-2270 | HCDR1 | GYTFTSYY |
| 1887 | YANG-2270 | HCDR2 | IKPSGGNT |
| 1888 | YANG-2270 | HCDR3 | ARTGDRAFDV |
| 1889 | YANG-2270 | VL domain | CAGTCTGTATTGACGCAGCCGCCCTCAGTGTCTGCGGCCCCAGG |
| | | nucleic | ACAGAAGGTCACCATCTCCTGCTCTGGAAGCAGCTCCAACATTG |
| | | acid | GAAATAATTTTGTATCCTGGTACCAACAGTTCCCAGGAACAGCC |
| | | sequence | CCCAAACTCCTCATTTATGACAATAATAAGCGACCCTCAGGGAT |
| | | | TCCTGACCGATTCTCTGGCTCCAAGTCTGGCACGTCAGCCACCC |
| | | | TGGGCATCACCGGACTCCAGACTGGGGACGAGGCCGATTATTAC |
| | | | TGCGGAACATGGGATAGCAGCCTGGGTGCTGGGGTGTTCGGCGG |
| | | | AGGGACCAAGCTGACCGTCCTA |
| 1890 | YANG-2270 | VL domain | QSVLTQPPSVSAAPGQKVTISCSGSSSNIGNNFVSWYQQFPGTA |
| | | amino | PKLLIYDNNKRPSGIPDRFSGSKSGTSATLGITGLQTGDEADYY |
| | | acid | CGTWDSSLGAGVFGGGTKLTVL |
| | | sequence | |
| 1891 | YANG-2270 | LCDR1 | SSNIGNNF |
| 1892 | YANG-2270 | LCDR2 | DNN |
| 1893 | YANG-2270 | LCDR3 | GTWDSSLGAGV |
| 1894 | YANG-2271 | VH domain | CAGATACAGCTGGTGCAGTCTGGGGCTGAGGTGCAGAAGCCTGG |
| | | nucleic | GGCCTCAGTGAAGTTTTCCTGCAAGACATCTGGATACACCTTCA |
| | | acid | CCAACTTCTATATCGTCTGGGTGCGACAGGCCCCTGGACAAGGA |
| | | sequence | CTTGAGTGGATGGGCATAATCAAACCTAGTGGTGGTAACACAAT |
| | | | CTACGCACAGAATTTCCAGGGCAGAGTCACCATGACCAGGGACA |
| | | | CGTCCACGAACACAATCTACATGGACCTGAGGAGTCTGAGATCT |
| | | | GAGGACACGGCCGTGTATTATTGTGCGAGAACTGGGGATAGGGC |
| | | | TTTTGATGTCTGGGGCCAAGGGACAATGGTCACCGTCTCTTCA |
| 1895 | YANG-2271 | VH domain | QIQLVQSGAEVQKPGASVKFSCKTSGYTFTNFYIVWVRQAPGQG |
| | | amino | LEWMGIIKPSGGNTIYAQNFQGRVTMTRDTSINTIYMDLRSLRS |
| | | acid | EDTAVYYCARTGDRAFDVWGQGTMVTVSS |
| | | sequence | |
| 1896 | YANG-2271 | HCDR1 | GYTFTNFY |
| 1897 | YANG-2271 | HCDR2 | IKPSGGNT |
| 1898 | YANG-2271 | HCDR3 | ARTGDRAFDV |
| 1899 | YANG-2271 | VL domain | CAGTCTGTGTTGACGCAGCCGCCCTCAGTGTCTGCGGCCCCAGG |
| | | nucleic | ACAGAAGGTCACCATCTCCTGCTCTGGAAGCAGCTCCAACATTG |
| | | acid | GGAATAATTTTGTATCCTGGTACCAGCAGTTCCCAGGAACAGCC |
| | | sequence | CCCAAACTCCTCATTTATGACAATCATAAGCGACCCTCAGGGAT |
| | | | TCCTGACCGATTCTCTGGCTCCAAGTCTGGCACGTCAGCCACCC |
| | | | TGGGCATCACCGGACTCCAGACTGGGGACGAGGCCGATTATTAC |
| | | | TGCGGAACATGGGATAGCAGCCTGGGTGCTGGGGTGTTCGGCGG |
| | | | AGGGACCAAGTTGACCGTCCTA |
| 1900 | YANG-2271 | VL domain | QSVLTQPPSVSAAPGQKVTISCSGSSSNIGNNFVSWYQQFPGTA |
| | | amino | PKLLIYDNHKRPSGIPDRFSGSKSGTSATLGITGLQTGDEADYY |
| | | acid | CGTWDSSLGAGVFGGGTKLTVL |
| | | sequence | |
| 1901 | YANG-2271 | LCDR1 | SSNIGNNF |
| 1902 | YANG-2271 | LCDR2 | DNH |
| 1903 | YANG-2271 | LCDR3 | GTWDSSLGAGV |
| 1904 | YANG-2272 | VH domain | CAGATGCAATTGGTGCAGTCTGGGGCTGAGGTGAAGAAGCCTGG |
| | | nucleic | GGCCTCAGTGAAGATTTCCTGCAAGACATCTGGATACACCTTCA |
| | | acid | CCAACTACTATATGGTCTGGGTGCGACAGGCCCCTGGACAAGGA |
| | | sequence | CTTGAGTGGATGGGCATAATCAAACCTAGTGGTGGTAACACGAT |
| | | | CTACGCACAGAAGTTCCAGGGCAGAGTCATCATGACCAGGGACA |
| | | | CGTCCACGAACACAGTCTATTTGGACCTGAACAGTCTGAGATCT |
| | | | GAGGACACGGCCGTGTATTATTGTGCGAAAACTGGGGATAGGGC |
| | | | TTTTAATGTCTGGGGCCACGGGACAATGGTCACCGTCTCTTCA |
| 1905 | YANG-2272 | VH domain | QMQLVQSGAEVKKPGASVKISCKTSGYTFTNYYMVWVRQAPGQG |
| | | amino | LEWMGIIKPSGGNTIYAQKFQGRVIMTRDTSTNTVYLDLNSLRS |
| | | acid | EDTAVYYCAKTGDRAFNVWGHGTMVTVSS |
| | | sequence | |
| 1906 | YANG-2272 | HCDR1 | GYTFTNYY |
| 1907 | YANG-2272 | HCDR2 | IKPSGGNT |
| 1908 | YANG-2272 | HCDR3 | AKTGDRAFNV |
| 1909 | YANG-2272 | VL domain | CAGTCTGTGTTGACGCAGCCGCCCTCAGTGTCTGCGGCCCCAGG |
| | | nucleic | ACAGAAGGTCACCATCTCCTGCTCTGGAAGCAGCTCCAACATTC |
| | | acid | GAAATAATTATGTTTCCTGGTACCAGCAGTTCCCAGGAACAGCC |
| | | sequence | CCCAAACTCCTCATTTATGACAATAATAAGCGACCCTCAGGGAT |
| | | | TCCTGACCGATTCTCTGGCTCCAAGTCTGGCACGTCTGCCACCC |
| | | | TGGGCATCACCGGACTCCAGACTGGGGACGAGGCCGATTATTAC |
| | | | TGCGGAACATGGGATAGCAGCCTGGGTGCTGGGGTGTTCGGCGG |
| | | | AGGGACCAAGCTGACCGTCCTT |
| 1910 | YANG-2272 | VL domain | QSVLTQPPSVSAAPGQKVTISCSGSSSNIRNNYVSWYQQFPGTA |
| | | amino | PKLLIYDNNKRPSGIPDRFSGSKSGTSATLGITGLQTGDEADYY |
| | | acid | CGTWDSSLGAGVFGGGTKLTVL |
| | | sequence | |
| 1911 | YANG-2272 | LCDR1 | SSNIRNNY |
| 1912 | YANG-2272 | LCDR2 | DNN |
| 1913 | YANG-2272 | LCDR3 | GTWDSSLGAGV |
| 1914 | YANG-2273 | VH domain | CAGATACAGCTGGTGCAGTCTGGGGCTGAGGTGAAGAAGCCTGG |
| | | nucleic | GGCCTCAGTGAAGTTTTCCTGCAAGACATCTGGATACACCTTCA |
| | | acid | CCAACTACTATATGGTCTGGGTGCGACAGGCCCCTGGACAAGGA |
| | | sequence | CTTGAGTGGATGGGCATAATCAAACCTAGTGGTGGTAACACAAT |
| | | | CTACGCACAGAATTTCCAGGGCAGAGTCACCATGACCAGGGACA |
| | | | CGTCCACGAACACAGTCTACATGGACCTGAGGAGTCTGAGATCT |
| | | | GAGGACACGGCCGTGTATTATTGTGCGAGAACTGGTGATAGGGC |
| | | | TTTTGATGTCTGGGGCCAAGGGACAATGGTCACCGTCTCTTCA |
| 1915 | YANG-2273 | VH domain | QIQLVQSGAEVKKPGASVKFSCKTSGYTFTNYYMVWVRQAPGQG |
| | | amino | LEWMGIIKPSGGNTIYAQNFQGRVTMTRDTSTNTVYMDLRSLRS |
| | | acid | EDTAVYYCARTGDRAFDVWGQGTMVTVSS |
| | | sequence | |
| 1916 | YANG-2273 | HCDR1 | GYTFTNYY |
| 1917 | YANG-2273 | HCDR2 | IKPSGGNT |
| 1918 | YANG-2273 | HCDR3 | ARTGDRAFDV |
| 1919 | YANG-2273 | VL domain | CAGTCTGTGTTGACGCAGCCGCCCTCAGTGTCTGCGGCCCCAGG |
| | | nucleic | ACAGAAGGTCACCATCTCCTGCTCTGGAAGCAGCTCCAACATTG |
| | | acid | GGAATAATTTTGTATCCTGGTACCAGCAGTTCCCAGGAACAGCC |
| | | sequence | CCCAAACTCCTCATTTATGACAATAATAAGCGACCCTCAGGGAT |
| | | | TCCTGACCGATTCTCTGGCTCCAAGTCTGGCACGTCAGCCACCC |
| | | | TGGGCATCACCGGACTCCAGACTGGGGACGAGGCCGATTATTAC |
| | | | TGCGGAACATGGGATAGCAGCCTGGGTGCTGGGGTGTTCGGCGG |
| | | | AGGGACCAAGCTGACCGTCCTA |
| 1920 | YANG-2273 | VL domain | QSVLTQPPSVSAAPGQKVTISCSGSSSNIGNNFVSWYQQFPGTA |
| | | amino | PKLLIYDNNKRPSGIPDRFSGSKSGTSATLGITGLQTGDEADYY |
| | | acid | CGTWDSSLGAGVFGGGTKLTVL |
| | | sequence | |
| 1921 | YANG-2273 | LCDR1 | SSNIGNNF |
| 1922 | YANG-2273 | LCDR2 | DNN |
| 1923 | YANG-2273 | LCDR3 | GTWDSSLGAGV |
| 1924 | YANG-2274 | VH domain | CAGCTGCAGCTGGTGCAGTCTGGGGCTGAGGTGAAGAAGCCTGG |
| | | nucleic | GGCCTCAGTGAAGATTTCCTGCAAGACATCTGGATACACCTTCA |
| | | acid | CCAGTTACTATATGGTCTGGGTGCGACAGGCCCCTGGACAAGGA |
| | | sequence | CTTGAATGGATGGGCATAATCAAACCTAGTGGTGGTAACACAAT |
| | | | CTACGCACAGAAGTTCCAGGGCAGAGTCACCATGACCAGGGACA |
| | | | CGTCCACGAATACAGTCTTCATGGACCTGAGGAGTCTGAGATCT |
| | | | GAAGACACGGCCGTGTATTATTGTGCGAGAACTGGGGATAGGGC |
| | | | TTTTGATGTCTGGGGCCAAGGGACACTGGTCACCGTCTCTACA |
| 1925 | YANG-2274 | VH domain | QLQLVQSGAEVKKPGASVKISCKTSGYTFTSYYMVWVRQAPGQG |
| | | amino | LEWMGIIKPSGGNTIYAQKFQGRVTMTRDTSTNTVFMDLRSLRS |
| | | acid | EDTAVYYCARTGDRAFDVWGQGTLVTVST |
| | | sequence | |
| 1926 | YANG-2274 | HCDR1 | GYTFTSYY |
| 1927 | YANG-2274 | HCDR2 | IKPSGGNT |
| 1928 | YANG-2274 | HCDR3 | ARTGDRAFDV |
| 1929 | YANG-2274 | VL domain | CAGTCTGTGTTGACGCAGCCGCCCTCAGTGTCTGCGGCCCCAGG |
| | | nucleic | ACAGAAGGTCACCATCTCCTGCTCTGGAAGCAGCTCCAACATTG |
| | | acid | GGAATAATTTTGTTTCCTGGTACCTGCAGTTCCCAGGAACAGCC |
| | | sequence | CCCAAACTCCTCATTTATGACAATAATAAGCGACCCTCAGGGAT |
| | | | TCCTGACCGATTCTCTGGCTCCAAGTCTGGCACGTCAGCCACCC |
| | | | TGGGCATCACCGGACTCCAGACTGGGGACGAGGCCGATTATTAC |
| | | | TGCGGAACATGGGATAGCAGCCTGGGTGCTGGGGTGTTCGGCGG |
| | | | AGGGACCCAGCTGACCGTCCTA |
| 1930 | YANG-2274 | VL domain | QSVLTQPPSVSAAPGQKVTISCSGSSSNIGNNFVSWYLQFPGTA |
| | | amino | PKLLIYDNNKRPSGIPDRFSGSKSGTSATLGITGLQTGDEADYY |
| | | acid | CGTWDSSLGAGVFGGGTQLTVL |
| | | sequence | |
| 1931 | YANG-2274 | LCDR1 | SSNIGNNF |
| 1932 | YANG-2274 | LCDR2 | DNN |
| 1933 | YANG-2274 | LCDR3 | GTWDSSLGAGV |
| 1934 | YANG-2275 | VH domain | CAGATGCAGTTGGTGCAGTCTGGGGCTGAGGTGAAGAAGCCTGG |
| | | nucleic | GGCCTCAGTGAAGATTTCCTGCAAGACATCTGGATACACCTTCA |
| | | acid | CCAACTACTATATGGTCTGGGTGCGACAGGCCCCGGGACAAGGA |
| | | sequence | CTTGAGTGGATGGGCATAATCAAACCTAGTGGCGGTGACACGAT |
| | | | CTACGCACAGAAGTTCCAGGGCAGAGTCACCATGACCAGGGACA |
| | | | CGTCCACGAACACAGTCTATATGGACCTGACCAGTCTGAGATCT |
| | | | GAGGACACGGCCGTCTATTATTGTGCGAGAACTGGGAATAGGGC |
| | | | TTTTGATGTCTGGGGCCACGGGACAATGGTCACCGTCTCTTCA |
| 1935 | YANG-2275 | VH domain | QMQLVQSGAEVKKPGASVKISCKTSGYTFTNYYMVWVRQAPGQG |
| | | amino | LEWMGIIKPSGGDTIYAQKFQGRVTMTRDTSTNTVYMDLTSLRS |
| | | acid | EDTAVYYCARTGNRAFDVWGHGTMVTVSS |
| | | sequence | |
| 1936 | YANG-2275 | HCDR1 | GYTFTNYY |
| 1937 | YANG-2275 | HCDR2 | IKPSGGDT |
| 1938 | YANG-2275 | HCDR3 | ARTGNRAFDV |
| 1939 | YANG-2275 | VL domain | CAGTCTGTGTTGACGCAGCCGCCCTCAGTGTCTGCGGCCCCAGG |
| | | nucleic | ACAGAAGGTCACCATCTCCTGCTCTGGAAGCAGCTCCAATATTG |
| | | acid | GGAATAATTATGTTTCCTGGTACCAGCAGTTCCCAGGAACAGCC |
| | | sequence | CCCAAACTCCTCATTTATGACAATAATAAGCGACCCTCAGGGAT |
| | | | TCCTGACCGATTCTCTGGCTCCAGGTCTGGCACGTCAGCCACCC |
| | | | TGGGCATCACCGGACTCCAGACTGGGGACGAGGCCGATTATTAC |
| | | | TGCGGAACATGGGATAGCAGCCTGGGTGCTGGGGTGTTCGGCGG |
| | | | AGGGACCAAGCTGACCGTCCTA |
| 1940 | YANG-2275 | VL domain | QSVLTQPPSVSAAPGQKVTISCSGSSSNIGNNYVSWYQQFPGTA |
| | | amino | PKLLIYDNNKRPSGIPDRESGSRSGTSATLGITGLQTGDEADYY |
| | | acid | CGTWDSSLGAGVFGGGTKLTVL |
| | | sequence | |
| 1941 | YANG-2275 | LCDR1 | SSNIGNNY |
| 1942 | YANG-2275 | LCDR2 | DNN |
| 1943 | YANG-2275 | LCDR3 | GTWDSSLGAGV |
| 1944 | YANG-2276 | VH domain | CAGATGCAATTGGTGCAGTCTGGGGCTGAGGTGAAGAAGCCTGG |
| | | nucleic | GGCCTCAGTGAAGATTTCCTGCAAGACATCTGGATACACCTTCA |
| | | acid | CCAACTACTATATGGTCTGGGTGCGACAGGCCCCTGGACAAGGA |
| | | sequence | CTTGAGTGGATGGGCATAATCAAACCTAGTGGTGGTAACACGAT |
| | | | CTACGCACAGAAGTTTCAGGGCAGAGTCACCATGGCCAGGGACA |
| | | | CGTCCACGAACACAGTCTATTTGGACCTGAGCAGTCTGAGATCT |
| | | | GAGGACACGGCCGTGTATTATTGTGCGAGAACTGGGGATAGGGC |
| | | | TTTTGATGTCTGGGGCCACGGGACAATGGTCACCGTCTCTTCA |
| 1945 | YANG-2276 | VH domain | QMQLVQSGAEVKKPGASVKISCKTSGYTFTNYYMVWVRQAPGQG |
| | | amino | LEWMGIIKPSGGNTIYAQKFQGRVTMARDTSTNTVYLDLSSLRS |
| | | acid | EDTAVYYCARTGDRAFDVWGHGTMVTVSS |
| | | sequence | |
| 1946 | YANG-2276 | HCDR1 | GYTFTNYY |
| 1947 | YANG-2276 | HCDR2 | IKPSGGNT |
| 1948 | YANG-2276 | HCDR3 | ARTGDRAFDV |
| 1949 | YANG-2276 | VL domain | CAGTCTGTGTTGACGCAGCCGCCCTCAGTGTCTGCGGCTCCAGG |
| | | nucleic | ACAGAAGGTCACCATCTCCTGCTCTGGAAGCAGCTCCAACATTG |
| | | acid | GGAATAATTATGTTTCCTGGTACCAGCAGTTCCCAGGAACAGCC |
| | | sequence | CCCAAACTCCTCATTTATGACAATAATAAGCGACCCTCAGGGAT |
| | | | TCCTGACCGATTCTCTGGCTCCAAGTCTGGCACGTCAGTCACCC |
| | | | TGGGCATCACCGGACTCCAGACTGGGGACGAGGCCGATTATTAC |
| | | | TGCGGAACATGGGATATCAGCCTGGGTGCTGGGGTGTTCGGCGG |
| | | | AGGGACCAAGCTGACCGTCCTA |
| 1950 | YANG-2276 | VL domain | QSVLTQPPSVSAAPGQKVTISCSGSSSNIGNNYVSWYQQFPGTA |
| | | amino | PKLLIYDNNKRPSGIPDRFSGSKSGTSVTLGITGLQTGDEADYY |
| | | acid | CGTWDISLGAGVFGGGTKLTVL |
| | | sequence | |
| 1951 | YANG-2276 | LCDR1 | SSNIGNNY |
| 1952 | YANG-2276 | LCDR2 | DNN |
| 1953 | YANG-2276 | LCDR3 | GTWDISLGAGV |
| 1954 | YANG-2277 | VH domain | CAGATACAGTTGGTGCAGTCTGGGGCTGAGGTGAAGAAGCCTGG |
| | | nucleic | GGCCTCAGTGAAGTTTTCCTGCAAGACATCTGGATACACCTTCA |
| | | acid | CCAACTACTATATGGTCTGGGTGCGACAGGCCCCTGGACAAGGA |
| | | sequence | CTTGAGTGGATGGGCATAATCAAACCTAGTGGTGGTAACACAAT |
| | | | CTACGCACAGAATTTCCAGGGCAGAGTCACCATGACCAGGGACA |
| | | | CGTCCACGAACACAGTCTACATGGACCTGAGGAGTCTGAGATCT |
| | | | GAGGACACGGCCGTGTATTATTGTGCGAGAACTGCTGATAGGGC |
| | | | TTTTGATGTCTGGGGCCAAGGGACAATGGTCACCGTCTCTTCA |
| 1955 | YANG-2277 | VH domain | QIQLVQSGAEVKKPGASVKFSCKTSGYTFTNYYMVWVRQAPGQG |
| | | amino | LEWMGIIKPSGGNTIYAQNFQGRVTMTRDTSTNTVYMDLRSLRS |
| | | acid | EDTAVYYCARTADRAFDVWGQGTMVTVSS |
| | | sequence | |
| 1956 | YANG-2277 | HCDR1 | GYTFTNYY |
| 1957 | YANG-2277 | HCDR2 | IKPSGGNT |
| 1958 | YANG-2277 | HCDR3 | ARTADRAFDV |
| 1959 | YANG-2277 | VL domain | CAGTCTGTGTTGACGCAGCCGCCCTCAGTGTCTGCGGCCCCAGG |
| | | nucleic | ACAGAAGGTCACCATCTCCTGCTCTGGAAGCAGCTCCAACATTG |
| | | acid | GGAATAATTTTGTATCCTGGTACCAGCAGTTCCCAGGAACAGCC |
| | | sequence | CCCAAACTCCTCATTTATGACAATAATAAGCGACCCTCAGGGAT |
| | | | TCCTGACCGATTCTCTGGCTCCAAGTCTGGCACGTCAGCCACCC |
| | | | TGGGCATCACCGGACTCCAGACTGGGGACGAGGCCGATTATTAC |
| | | | TGCGGAACATGGGATAGCAGCCTGGGTGCTGGGGTGTTCGGCGG |
| | | | AGGGACCATGTTGACCGTCCTA |
| 1960 | YANG-2277 | VL domain | QSVLTQPPSVSAAPGQKVTISCSGSSSNIGNNFVSWYQQFPGTA |
| | | amino | PKLLIYDNNKRPSGIPDRFSGSKSGTSATLGITGLQTGDEADYY |
| | | acid | CGTWDSSLGAGVFGGGTMLTVL |
| | | sequence | |
| 1961 | YANG-2277 | LCDR1 | SSNIGNNF |
| 1962 | YANG-2277 | LCDR2 | DNN |
| 1963 | YANG-2277 | LCDR3 | GTWDSSLGAGV |
| 1964 | YANG-2278 | VH domain | CAGATTCAGTTGGTGCAGTCTGGGGCTGAGGTGAAGAAGCCTGG |
| | | nucleic | GGCCTCAGTGAAGCTTTCCTGCAAGACATCTGGATACACCTTCA |
| | | acid | CCAGCTACTATATGGTCTGGGTGCGACAGGCCCCTGGACAAGGA |
| | | sequence | CTTGAGTGGATGGGCATAATCAAACCTAGTGGTGGTAACACAAT |
| | | | CTACGCACAGAAGTTCCAGGGCAGAGTCACCATGACCAGGGACA |
| | | | CGTCCACGAACACAGTCTACATGGACCTGAACAGTCTGAGATCT |
| | | | GAGGACACGGCCGTCTATTATTGTGCGAGAACTGGAGATAGGGC |
| | | | TTTTGATGTCTGGGGCCACGGGACAATGGTCACCGTGTCTTCA |
| 1965 | YANG-2278 | VH domain | QIQLVQSGAEVKKPGASVKLSCKTSGYTFTSYYMVWVRQAPGQG |
| | | amino | LEWMGIIKPSGGNTIYAQKFQGRVTMTRDTSINTVYMDLNSLRS |
| | | acid | EDTAVYYCARTGDRAFDVWGHGTMVTVSS |
| | | sequence | |
| 1966 | YANG-2278 | HCDR1 | GYTFTSYY |
| 1967 | YANG-2278 | HCDR2 | IKPSGGNT |
| 1968 | YANG-2278 | HCDR3 | ARTGDRAFDV |
| 1969 | YANG-2278 | VL domain | CAGTCTGTGTTGACGCAGCCGCCCTCAGTGTCTGCGGCCCCAGG |
| | | nucleic | ACAGAAGGTCACCATCTCCTGCTCTGGAAGCAGCTCCAACATTG |
| | | acid | GGAATAATTATGTATCCTGGTACCAGCAGTTCCCAGGAACAGCC |
| | | sequence | CCCAAACTCCTCATTTATGACAATAATAAGCGACCCTCAGGGAT |
| | | | TCCTGACCGATTCTCTGGCTCCAAGTCTGGCACGTCAGCCACCC |
| | | | TGGGCATCACCGGACTCCAGACTGGGGACGAGGCCGATTATTAC |
| | | | TGCGGAACATGGGATAGCAGCCTGGGTGCTGGGGTGTTCGGCGG |
| | | | AGGGACCAAGCTGACCGTCCTA |
| 1970 | YANG-2278 | VL domain | QSVLTQPPSVSAAPGQKVTISCSGSSSNIGNNYVSWYQQFPGTA |
| | | amino | PKLLIYDNNKRPSGIPDRFSGSKSGTSATLGITGLQTGDEADYY |
| | | acid | CGTWDSSLGAGVFGGGTKLTVL |
| | | sequence | |
| 1971 | YANG-2278 | LCDR1 | SSNIGNNY |
| 1972 | YANG-2278 | LCDR2 | DNN |
| 1973 | YANG-2278 | LCDR3 | GTWDSSLGAGV |
| 1974 | YANG-2279 | VH domain | CAGATGCAATTGGTGCAGTCTGGGGCTGAGGTGAAGAAGCCTGG |
| | | nucleic | GGCCTCAGTGAAGATTTCCTGCAAGACATCTGGATACACCTTCA |
| | | acid | CCAACTACTATATGGTCTGGGTGCGACAGGCCCCTGGACAAGGA |
| | | sequence | CTTGAGTGGATGGGCATAATCAAACCTAGTGGTGGTAACGCGAT |
| | | | CTACGCACAGAAGTTCCAGGGCAGAGTCACCATGACCAGGGACA |
| | | | CGTCCACGAACACAGTCTATTTGGACCTGAGCAGTCTGAGATCT |
| | | | GAGGACACGGCCGTGTACTATTGTGCGAGAACTGGAGATAGGGC |
| | | | TTTTGATGTCTGGGGCCACGGGACAATGGTCACCGTCTCTTCA |
| 1975 | YANG-2279 | VH domain | QMQLVQSGAEVKKPGASVKISCKTSGYTFTNYYMVWVRQAPGQG |
| | | amino | LEWMGIIKPSGGNAIYAQKFQGRVTMTRDTSTNTVYLDLSSLRS |
| | | acid | EDTAVYYCARTGDRAFDVWGHGTMVTVSS |
| | | sequence | |
| 1976 | YANG-2279 | HCDR1 | GYTFTNYY |
| 1977 | YANG-2279 | HCDR2 | IKPSGGNA |
| 1978 | YANG-2279 | HCDR3 | ARTGDRAFDV |
| 1979 | YANG-2279 | VL domain | CAGTCTGTGTTGACGCAGCCGCCCTCAGTGTCTGCGGCCCCAGG |
| | | nucleic | ACAGAAGGTCACCATCTCCTGCTCTGGAAGCAGCTCCAACATTG |
| | | acid | GGAATAATTATGTTTCCTGGTACCAGCAGTTCCCAGGAACAGCC |
| | | sequence | CCCAAACTCCTCATTTATGACAATAATAAGCGACCCTCAGGGAT |
| | | | TCCTGACCGATTCTCTGGCTCCAAGTCTGGCACGTCAGCCACCC |
| | | | TGGGCATCACCGGACTCCAGACTGGGGACGAGGCCGATTATTAC |
| | | | TGCGGAACATGGGATAGCAGCCTGGGTGCTGGGGTGTTCGGCGG |
| | | | AGGGACCAAGCTGACCGTCCTA |
| 1980 | YANG-2279 | VL domain | QSVLTQPPSVSAAPGQKVTISCSGSSSNIGNNYVSWYQQFPGTA |
| | | amino | PKLLIYDNNKRPSGIPDRFSGSKSGTSATLGITGLQTGDEADYY |
| | | acid | CGTWDSSLGAGVFGGGTKLTVL |
| | | sequence | |
| 1981 | YANG-2279 | LCDR1 | SSNIGNNY |
| 1982 | YANG-2279 | LCDR2 | DNN |
| 1983 | YANG-2279 | LCDR3 | GTWDSSLGAGV |
| 1984 | YANG-2280 | VH domain | CAGATACAGCTGGTGCAGTCTGGGGCTGAGGTGAAGAAGCCTGG |
| | | nucleic | GGCCTCAGTGAAGTTTTCCTGCAAGACATCTGGATACATTTTCA |
| | | acid | CCAACTACTATATGGTCTGGGTGCGACAGGCCCCTGGACAAGGA |
| | | sequence | CTTGAGTGGATGGGCATAATCAAACCTAGTGGAGGTAACACAAT |
| | | | CTACGCACAGAAGTTCCAGGGCAGAGTCACCATGACCAGGGACA |
| | | | CGTCCACTAACACAGTCTACATGGACCTGAATAATCTGAGATCT |
| | | | GAGGACACGGCCGTGTATTTTTGTGCGAGAACTGGTGATAGGGC |
| | | | TTTTGATGTCTGGGGCCAAGGGTCAATGGTCACCGTCTCTTCA |
| 1985 | YANG-2280 | VH domain | QIQLVQSGAEVKKPGASVKFSCKTSGYIFTNYYMVWVRQAPGQG |
| | | amino | LEWMGIIKPSGGNTIYAQKFQGRVTMTRDTSTNTVYMDLNNLRS |
| | | acid | EDTAVYFCARTGDRAFDVWGQGSMVTVSS |
| | | sequence | |
| 1986 | YANG-2280 | HCDR1 | GYIFTNYY |
| 1987 | YANG-2280 | HCDR2 | IKPSGGNT |
| 1988 | YANG-2280 | HCDR3 | ARTGDRAFDV |
| 1989 | YANG-2280 | VL domain | CAGTCTGTGTTGACGCAGCCGCCCTCAATGTCTGCGGCCCCAGG |
| | | nucleic | ACAGAAGGTCACCATCTCCTGCTCTGGAAGCAGCTCCAACATTG |
| | | acid | GGAATAATTTTGTATCCTGGTACCGGCAGTTCCCCGGAACAGCC |
| | | sequence | CCCAAACTCCTCATTTATGACAATAATAAGCGACCCTCAGGGAT |
| | | | TCCTGACCGATTCTCTGGCTCCAAGTCTGGCACGTCAGCCACCC |
| | | | TGGGCATCACCGGACTCCAGACTGGGGACGAGGCCGATTATTAC |
| | | | TGCGGGACATGGGATAGCAGCCTGAGTGCTGGGGTGTTCGGCGG |
| | | | AGGGACCAAGCTGACCGTCCTA |
| 1990 | YANG-2280 | VL domain | QSVLTQPPSMSAAPGQKVTISCSGSSSNIGNNFVSWYRQFPGTA |
| | | amino | PKLLIYDNNKRPSGIPDRFSGSKSGTSATLGITGLQTGDEADYY |
| | | acid | CGTWDSSLSAGVFGGGTKLTVL |
| | | sequence | |
| 1991 | YANG-2280 | LCDR1 | SSNIGNNF |
| 1992 | YANG-2280 | LCDR2 | DNN |
| 1993 | YANG-2280 | LCDR3 | GTWDSSLSAGV |
| 1994 | YANG-2281 | VH domain | CAGATGCAGTTGGTGCAGTCTGGGGCTGAGGTGAAGAAGCCTGG |
| | | nucleic | GGCCTCAGTGAAGATTTCCTGCAAGACATCTGGATATATTTTCA |
| | | acid | CCAACTACTATATGGTCTGGGTGCGACAGGCCTCTGGACAAGGA |
| | | sequence | CTTGAGTGGATGGGCATAATCAAACCTAGTGGTGGTAACACGAT |
| | | | CTACGCACAGAGGTTCCAGGGCAGAGTCACCATGACCAGAGACA |
| | | | CGTCCACGAACACAGTCTATATGGACCTGAGCAGTCTGAGATCT |
| | | | GAGGACACGGCCGTGTATTATTGTGCGAGAACTGGGAATAGGGC |
| | | | TTTTGATGTCTGGGGCCACGGGACAATGGTCACCGTCTCTTCA |
| 1995 | YANG-2281 | VH domain | QMQLVQSGAEVKKPGASVKISCKTSGYIFTNYYMVWVRQASGQG |
| | | amino | LEWMGIIKPSGGNTIYAQRFQGRVTMTRDTSTNTVYMDLSSLRS |
| | | acid | EDTAVYYCARTGNRAFDVWGHGTMVTVSS |
| | | sequence | |
| 1996 | YANG-2281 | HCDR1 | GYIFTNYY |
| 1997 | YANG-2281 | HCDR2 | IKPSGGNT |
| 1998 | YANG-2281 | HCDR3 | ARTGNRAFDV |
| 1999 | YANG-2281 | VL domain | CAGTCTGTGTTGACGCAGCCGCCCTCAGTGTCTGCGGCCCCAGG |
| | | nucleic | ACAGAAGGTCACCATCTCCTGCTCTGGAAGCAGCTCCAACATTG |
| | | acid | CGAATAATTATGTTTCCTGGTACCAGCAGTTCCCAGGAACAGCC |
| | | sequence | CCCAAACTCCTCATTTTTGACAATAATAAGCGACCCTCAGGGAT |
| | | | TCCTGACCGATTCTCTGGCTCCAAGTCTGGCACGTCAGCCACCC |
| | | | TGGGCATCACCGGACTCCAGACTGGGGACGAGGCCGATTATTAC |
| | | | TGCGGAACATGGGATAGCAGCCTGGGTGCTGGGGTGTTCGGCGG |
| | | | AGGGACCAAGCTGACCGTCCTA |
| 2000 | YANG-2281 | VL domain | QSVLTQPPSVSAAPGQKVTISCSGSSSNIANNYVSWYQQFPGTA |
| | | amino | PKLLIFDNNKRPSGIPDRFSGSKSGTSATLGITGLQTGDEADYY |
| | | acid | CGTWDSSLGAGVFGGGTKLTVL |
| | | sequence | |
| 2001 | YANG-2281 | LCDR1 | SSNIANNY |
| 2002 | YANG-2281 | LCDR2 | DNN |
| 2003 | YANG-2281 | LCDR3 | GTWDSSLGAGV |
| 2004 | YANG-2282 | VH domain | CAGATTCAGTTGGTGCAGTCTGGGGCTGAGGTGAAGAAGCCTGG |
| | | nucleic | GGCCTCAGTGAAGTTTTCCTGCAAGACATCTGGATACACCTTCA |
| | | acid | CCAGTTACTATATGGTCTGGGTGCGACAGGCCCCTGGACAAGGA |
| | | sequence | CTTGAGTGGATGGGCATAATCAAACCTAGTGGTGGTAACACAAT |
| | | | CTACGCACAGAAGTTCCAGGGCAGAGTCACCATGACCAGGGACA |
| | | | CGTCCACGAACACAGTCTACATGGACCTGAACAGTCTGAGATCT |
| | | | GAGGACACGGCCGTCTATTATTGTGCGAGAACTGGAGATAGGGC |
| | | | TTTTGATGTCTGGGGCCACGGGACAATGGTCACCGTGTCTTCA |
| 2005 | YANG-2282 | VH domain | QIQLVQSGAEVKKPGASVKFSCKTSGYTFTSYYMVWVRQAPGQG |
| | | amino | LEWMGIIKPSGGNTIYAQKFQGRVTMTRDTSTNTVYMDLNSLRS |
| | | acid | EDTAVYYCARTGDRAFDVWGHGTMVTVSS |
| | | sequence | |
| 2006 | YANG-2282 | HCDR1 | GYTFTSYY |
| 2007 | YANG-2282 | HCDR2 | IKPSGGNT |
| 2008 | YANG-2282 | HCDR3 | ARTGDRAFDV |
| 2009 | YANG-2282 | VL domain | CAGTCTGTGTTGACGCAGCCGCCCTCAGTGTCTGCGGCCCCAGG |
| | | nucleic | ACAGAAGGTCACCATCTCCTGCTCTGGAAGCAGCTCCAACATTG |
| | | acid | GGAATAATTATGTATCCTGGTACCAGCAGTTTGCAGGAACAGCC |
| | | sequence | CCCAAACTCCTCATTTATGACAATAATAAGCGACCCTCAGGGAT |
| | | | TCCTGACCGATTCTCTGGCTCCAAGTCTGGCACGTCAGCCACCC |
| | | | TGGGCATCGCCGGACTCCAGACTGGGGACGAGGCCGATTATTAC |
| | | | TGCGGAACATGGGATAGCAGCCTGGGTGCTGGGGTGTTCGGCGG |
| | | | AGGGACCAAACTGACCGTCCTA |
| 2010 | YANG-2282 | VL domain | QSVLTQPPSVSAAPGQKVTISCSGSSSNIGNNYVSWYQQFAGTA |
| | | amino | PKLLIYDNNKRPSGIPDRFSGSKSGTSATLGIAGLQTGDEADYY |
| | | acid | CGTWDSSLGAGVFGGGTKLTVL |
| | | sequence | |
| 2011 | YANG-2282 | LCDR1 | SSNIGNNY |
| 2012 | YANG-2282 | LCDR2 | DNN |
| 2013 | YANG-2282 | LCDR3 | GTWDSSLGAGV |
| 2014 | YANG-2283 | VH domain | CAGATTCAGTTGGTGCAGTCTGGGGCTGAGGTGAAGAAGCCTGG |
| | | nucleic | GGCCTCAGTGAAGTTTTCCTGCAAGACATCTGGATACAGCTTCA |
| | | acid | TCAATTATTATATGGTCTGGGTGCGCCAGGCCCCTGGACAAGGA |
| | | sequence | CTTGAGTGGATGGGCATAATCAAACCTAGTGGTGGTAACACAAT |
| | | | CTACGCACAGAAGTTCCAGGGCAGAGTCACCATGACCAGGGACA |
| | | | CGTCCACGAACACAGTCTACATGGACCTGCGCAGTCTGAGATCT |
| | | | GAGGACACGGCCGTATATTATTGTGCGAGAACTGGGGATAGGGC |
| | | | TTTTGATGTCTGGGGCCACGGGACAATGATCACCGTCTCTTCA |
| 2015 | YANG-2283 | VH domain | QIQLVQSGAEVKKPGASVKFSCKTSGYSFINYYMVWVRQAPGQG |
| | | amino | LEWMGIIKPSGGNTIYAQKFQGRVTMTRDTSTNTVYMDLRSLRS |
| | | acid | EDTAVYYCARTGDRAFDVWGHGTMITVSS |
| | | sequence | |
| 2016 | YANG-2283 | HCDR1 | GYSFINYY |
| 2017 | YANG-2283 | HCDR2 | IKPSGGNT |
| 2018 | YANG-2283 | HCDR3 | ARTGDRAFDV |
| 2019 | YANG-2283 | VL domain | CAGTCTGTGTTGACGCAGCCGCCCTCAGTGTCTGCGGCCCCAGG |
| | | nucleic | ACAGAAGGTCACCATCTCCTGCTCTGGAAGCAACTCCAACATTG |
| | | acid | GGAATAATTTTGTATCCTGGTACCAACAGTTCCCAGGAACAGCC |
| | | sequence | CCCAAACTCCTCATTTATGACAATAATAAGCGACCCTCAGGGAT |
| | | | TCCTGACCGATTCTCTGGCTCCAAGTCTGGCACGTCAGCCACCC |
| | | | TGGGCATCACCGGACTCCAGACTGGGGACGAGGCCGATTATTAC |
| | | | TGCGGAACATGGGATAGCAGCCTGGGTGCTGGGGTGTTCGGCGG |
| | | | AGGGACCAAGTTGACCGTCCTA |
| 2020 | YANG-2283 | VL domain | QSVLTQPPSVSAAPGQKVTISCSGSNSNIGNNFVSWYQQFPGTA |
| | | amino | PKLLIYDNNKRPSGIPDRFSGSKSGTSATLGITGLQTGDEADYY |
| | | acid | CGTWDSSLGAGVFGGGTKLTVL |
| | | sequence | |
| 2021 | YANG-2283 | LCDR1 | NSNIGNNE |
| 2022 | YANG-2283 | LCDR2 | DNN |
| 2023 | YANG-2283 | LCDR3 | GTWDSSLGAGV |
| 2024 | YANG-2284 | VH domain | CAGATTCAGTTGGTGCAGTCTGGGGCTGAGGTGAAGAAGCCTGG |
| | | nucleic | GGCCTCAGTGAAGTTTTCCTGCAAGACATCTGGATACACCTTCA |
| | | acid | CCAGCTACTATATGGTCTGGGTGCGACAGGCCCCTGGACAAGGA |
| | | sequence | CTTGAGTGGATGGGCATAATCAAACCTAGTGGTGGTAACACAAT |
| | | | CTACGCACAGAAGTTCCAGGGCAGAGTCACCATGACCAGGGACA |
| | | | CGTCCACGAACACAGTCTACATGGACCTGAACAGTCTGAGATCT |
| | | | GAGGACACGGCCGTCTATTATTGTGCGAGAACTGGAGATAGGGC |
| | | | TTTTGATGTCTGGGGCCACGGGACAATGGTCACCGTGTCTTCA |
| 2025 | YANG-2284 | VH domain | QIQLVQSGAEVKKPGASVKFSCKTSGYTFTSYYMVWVRQAPGQG |
| | | amino | LEWMGIIKPSGGNTIYAQKFQGRVTMTRDTSTNTVYMDLNSLRS |
| | | acid | EDTAVYYCARTGDRAFDVWGHGTMVTVSS |
| | | sequence | |
| 2026 | YANG-2284 | HCDR1 | GYTFTSYY |
| 2027 | YANG-2284 | HCDR2 | IKPSGGNT |
| 2028 | YANG-2284 | HCDR3 | ARTGDRAFDV |
| 2029 | YANG-2284 | VL domain | CAGTCTGTGTTGACGCAGCCGCCCTCAGTGTCTGCGGCCCCAGG |
| | | nucleic | ACAGAAGGTCACCATCTCCTGCTCTGGAAGCAGCTCCAACATTG |
| | | acid | GGAATAATTATGTATCCTGGTACCAGCAGTTCCCAGGAACAGCC |
| | | sequence | CCCAAACTCCTCATTTATGACAATAATAAGCGACCCTCAGGGAT |
| | | | TCCTGACCGATTCTCTGCTTCCAAGACTGGCACGTCAGCCACCC |
| | | | TGGGCATCACCGGACCCCAGACTGGGGACGAGGCCGATTATTAC |
| | | | TGCGGAACATGGGATAGCAGCCTGGGTGCTGGGGTGTTCGGCGG |
| | | | AGGGACCAAACTGACCGTCCTA |
| 2030 | YANG-2284 | VL domain | QSVLTQPPSVSAAPGQKVTISCSGSSSNIGNNYVSWYQQFPGTA |
| | | amino | PKLLIYDNNKRPSGIPDRFSASKTGTSATLGITGPQTGDEADYY |
| | | acid | CGTWDSSLGAGVFGGGTKLTVL |
| | | sequence | |
| 2031 | YANG-2284 | LCDR1 | SSNIGNNY |
| 2032 | YANG-2284 | LCDR2 | DNN |
| 2033 | YANG-2284 | LCDR3 | GTWDSSLGAGV |
| 2034 | YANG-2285 | VH domain | CAAATGCAGTTGGTGCAGTCTGGGGCTGAGGTGAAGAAGCCTGG |
| | | nucleic | GGCCTCAGTGAAGATTTCCTGCAAGACATCTGGATACACCTTCA |
| | | acid | TCAACTACTATATGGTCTGGGTGCGACAGGCCCCTGGACAAGGA |
| | | sequence | CTTGAGTGGATGGGCATAATCAATCCTAGTGGTGGTAATACGGT |
| | | | CTACGCACAGAAGTTCCAGGGCAGAGTCACCATGACCAGGGACA |
| | | | CGTCCACGAACACAGTCTATATGGACCTGAGCAGTCTGAGATCT |
| | | | GAGGACACGGCCGTCTATTATTGTGCGAGAACTGGTGATAGGGC |
| | | | TTTTGATGTCTGGGGCCACGGGACAATGGTCACCGTCTCTTCA |
| 2035 | YANG-2285 | VH domain | QMQLVQSGAEVKKPGASVKISCKTSGYTFINYYMVWVRQAPGQG |
| | | amino | LEWMGIINPSGGNTVYAQKFQGRVTMTRDTSTNTVYMDLSSLRS |
| | | acid | EDTAVYYCARTGDRAFDVWGHGTMVTVSS |
| | | sequence | |
| 2036 | YANG-2285 | HCDR1 | GYTFINYY |
| 2037 | YANG-2285 | HCDR2 | INPSGGNT |
| 2038 | YANG-2285 | HCDR3 | ARTGDRAFDV |
| 2039 | YANG-2285 | VL domain | CAGTCTGTGTTGACGCAGCCGCCCTCAGTGTCTGCGGCCCCAGG |
| | | nucleic | ACAGAAGGTCACCATCTCCTGCTCTGGAAGCAGCTCCAACATTG |
| | | acid | GGAATAATTATGTTTCCTGGTACCAGCAGTTCCCAGGAACAGCC |
| | | sequence | CCCAAACTCCTCATTTATGACAATCATAGGCGACCCTCAGGGAT |
| | | | TCCTGACCGATTCTCTGCCTCCAAGTCTGGCACGTCAGCCACCC |
| | | | TGGGCATCACCGGACTCCTGACTGGGGACGAGGCCGATTATTAC |
| | | | TGCGGAACATGGGATAGCGGCCTGGGTGCTGGGGTGTTCGGCGG |
| | | | AGGGACCAAGCTGACCGTCCTA |
| 2040 | YANG-2285 | VL domain | QSVLTQPPSVSAAPGQKVTISCSGSSSNIGNNYVSWYQQFPGTA |
| | | amino | PKLLIYDNHRRPSGIPDRESASKSGTSATLGITGLLTGDEADYY |
| | | acid | CGTWDSGLGAGVFGGGTKLTVL |
| | | sequence | |
| 2041 | YANG-2285 | LCDR1 | SSNIGNNY |
| 2042 | YANG-2285 | LCDR2 | DNH |
| 2043 | YANG-2285 | LCDR3 | GTWDSGLGAGV |
| 2044 | YANG-2286 | VH domain | CAGATGCAATTGGTGCAGTCTGGGGCTGAGGTGAAGAAGCCTGG |
| | | nucleic | GGCCTCAGTGAAGATTTCCTGCAAGACATCTGGATACACCTTCA |
| | | acid | CCAATTACTATATGGTCTGGGTGCGACAGGCCCCTGGACAAGGA |
| | | sequence | CTTGAGTGGATGGGCATAATCAAACCTAGTGGTGGTAACACGAT |
| | | | CTACGCACAGAAGTTCCAGGGCAGAGTCACCATGACCAGGGACA |
| | | | CGTCCACGACCACAGTCTATTTGGACCTGAACAGTCTGAGATCT |
| | | | GAGGACACGGCCGTGTATTATTGTGCGAGAACTGGGGATAGGGC |
| | | | TTTTGATGTCTGGGGCCACGGGACAATGGTCACCGTCTCTTCA |
| 2045 | YANG-2286 | VH domain | QMQLVQSGAEVKKPGASVKISCKTSGYTFTNYYMVWVRQAPGQG |
| | | amino | LEWMGIIKPSGGNTIYAQKFQGRVTMTRDTSTTTVYLDLNSLRS |
| | | acid | EDTAVYYCARTGDRAFDVWGHGTMVTVSS |
| | | sequence | |
| 2046 | YANG-2286 | HCDR1 | GYTFTNYY |
| 2047 | YANG-2286 | HCDR2 | IKPSGGNT |
| 2048 | YANG-2286 | HCDR3 | ARTGDRAFDV |
| 2049 | YANG-2286 | VL domain | CAGTCTGTGTTGACGCAGCCGCCCTCAGTGTCTGCGGCCCCAGG |
| | | nucleic | ACAGAAGGTCACCATCTCCTGCTCTGGAACCAGCTCCAACATTG |
| | | acid | GGAATAATTATGTTTCCTGGTACCAGCAGTTCCCAGGAACAGCC |
| | | sequence | CCCAAACTCCTCATTTATGACAATAATAAGCGACCCTCAGGGAT |
| | | | TCCTGACCGATTCTCTGGCTCCAAGTCTGGCACGTCAGCCACCC |
| | | | TGGGCATCACCGGACTCCAGACTGGGGACGAGGCCGATTATTAC |
| | | | TGCGGAACATGGGATAGCAGCCTGGGTGCTGGGGTGTTCGGCGG |
| | | | AGGGACCACGCTGACCGTCCTA |
| 2050 | YANG-2286 | VL domain | QSVLTQPPSVSAAPGQKVTISCSGTSSNIGNNYVSWYQQFPGTA |
| | | amino | PKLLIYDNNKRPSGIPDRFSGSKSGTSATLGITGLQTGDEADYY |
| | | acid | CGTWDSSLGAGVFGGGTTLTVL |
| | | sequence | |
| 2051 | YANG-2286 | LCDR1 | SSNIGNNY |
| 2052 | YANG-2286 | LCDR2 | DNN |
| 2053 | YANG-2286 | LCDR3 | GTWDSSLGAGV |
| 2054 | YANG-2287 | VH domain | CAGATACAACTGGTGCAGTCTGGGGCTGAGGTGAAGAAGCCTGG |
| | | nucleic | GGCCTCAGTGAAGTTTTCCTGCAAGACATCTGGATACACCTTCA |
| | | acid | CCAACTACTATATGGTCTGGGTGCGACAGGCCCCTGGACAAGGA |
| | | sequence | CTTGAGTGGATGGGCATAATCAAACCTAGTGGTGGTAACACAAT |
| | | | CTACGCACAGAACTTCCAGGGCAGAGTCACCATGACCAGGGACA |
| | | | CGTCCACGAACACAGTCTACATGGACCTGAGGACTCTGAGATCT |
| | | | GAGGACACGGCCGTTTATTATTGTGCGAGAACTGGTGATAGGGC |
| | | | TTTTGATGTCTGGGGCCAAGGGACAATGGTCACCGTCTCTTCA |
| 2055 | YANG-2287 | VH domain | QIQLVQSGAEVKKPGASVKFSCKTSGYTFTNYYMVWVRQAPGQG |
| | | amino | LEWMGIIKPSGGNTIYAQNFQGRVTMTRDTSTNTVYMDLRTLRS |
| | | acid | EDTAVYYCARTGDRAFDVWGQGTMVTVSS |
| | | sequence | |
| 2056 | YANG-2287 | HCDR1 | GYTFTNYY |
| 2057 | YANG-2287 | HCDR2 | IKPSGGNT |
| 2058 | YANG-2287 | HCDR3 | ARTGDRAFDV |
| 2059 | YANG-2287 | VL domain | CAGTCTGTGTTGACGCAGCCGCCCTCAGTGTCTGCGGCCCCAGG |
| | | nucleic | ACAGAAGGTCACCATCTCCTGCTCTGGAAGCAGCTCCAACATTG |
| | | acid | GGAATAATTTTGTTTCCTGGTACCAGCAGTTCCCAGGAACAGCC |
| | | sequence | CCCAAACTCCTCATTTATGACAATAATAAGCGACCCTCAGGGAT |
| | | | TCCTGACCGATTCTCTGGCTCCAAGTCTGGCACGTCAGCCACCC |
| | | | TGGGCATCACCGGATTCCAGACTGGGGACGAGGCCGATTATTAC |
| | | | TGCGGAACATGGGATAGCAGCCTGGGTGCTGGGGTGTTCGGCGG |
| | | | AGGGACCAGGCTGACCGTCCTA |
| 2060 | YANG-2287 | VL domain | QSVLTQPPSVSAAPGQKVTISCSGSSSNIGNNFVSWYQQFPGTA |
| | | amino | PKLLIYDNNKRPSGIPDRFSGSKSGTSATLGITGFQTGDEADYY |
| | | acid | CGTWDSSLGAGVFGGGTRLTVL |
| | | sequence | |
| 2061 | YANG-2287 | LCDR1 | SSNIGNNF |
| 2062 | YANG-2287 | LCDR2 | DNN |
| 2063 | YANG-2287 | LCDR3 | GTWDSSLGAGV |
| 2064 | YANG-2288 | VH domain | CAGATGCAGCTGGTACAGTCTGGGGCTGAGGTGAAGAAGCCTGG |
| | | nucleic | GGCCTCAGTGAAGATTTCCTGCAAGACATCTGGATACACCTTCA |
| | | acid | CCAGCTACTATATGGTCTGGGTGCGACAGGCCCCTGGACAAGGA |
| | | sequence | CTTGAGTGGATGGGCATAATCAAACCTAGTGGTGGTAACACAAT |
| | | | CTATGCACAGAAGTTCCAGGGCAGAGTCAACATGACCAGGGACA |
| | | | CGTCCACGAACACAGTCTATATGGACCTGAGTAGTCTGAGATCT |
| | | | GAGGACACGGCCGTGTATTATTGTGCGAGAACTGGGGATAGGGC |
| | | | TTTTGATGTCTGGGGCCAAGGGACAATGGTCACCGTCTCTTCA |
| 2065 | YANG-2288 | VH domain | QMQLVQSGAEVKKPGASVKISCKTSGYTFTSYYMVWVRQAPGQG |
| | | amino | LEWMGIIKPSGGNTIYAQKFQGRVNMTRDTSTNTVYMDLSSLRS |
| | | acid | EDTAVYYCARTGDRAFDVWGQGTMVTVSS |
| | | sequence | |
| 2066 | YANG-2288 | HCDR1 | GYTFTSYY |
| 2067 | YANG-2288 | HCDR2 | IKPSGGNT |
| 2068 | YANG-2288 | HCDR3 | ARTGDRAFDV |
| 2069 | YANG-2288 | VL domain | CAGTCTGTGTTGACGCAGCCGCCCTCAGTGTCTGCGGCCCCAGG |
| | | nucleic | ACAGAAGGTCACCATCTCCTGCTCTGGAAGTACCTCCAACATTG |
| | | acid | GGACTAATTATGTCTCCTGGTACCAGCAGCTCCCAGGAACAGCC |
| | | sequence | CCCAAACTCCTCATTTATGACAATAGTAAGCGCCCCTCAGGGAT |
| | | | TCCTGACCGATTCTCTGGCTCCAAGTCTGGCACGTCAGCCACCC |
| | | | TGGGCATCACCGGACTCCAGACTGGGGACGAGGCCGATTATTAC |
| | | | TGCGGAACATGGGATAGCAGCCTGGGTGCTGGGGTGTTCGGCGG |
| | | | AGGGACCAAACTGACCGTCCTA |
| 2070 | YANG-2288 | VL domain | QSVLTQPPSVSAAPGQKVTISCSGSTSNIGTNYVSWYQQLPGTA |
| | | amino | PKLLIYDNSKRPSGIPDRFSGSKSGTSATLGITGLQTGDEADYY |
| | | acid | CGTWDSSLGAGVFGGGTKLTVL |
| | | sequence | |
| 2071 | YANG-2288 | LCDR1 | TSNIGTNY |
| 2072 | YANG-2288 | LCDR2 | DNS |
| 2073 | YANG-2288 | LCDR3 | GTWDSSLGAGV |
| 2074 | YANG-2289 | VH domain | CAGATGCAATTGGTGCAGTCTGGGGCTGAGGTGAAGAAGCCTGG |
| | | nucleic | GGCCTCAGTGAAGATTTCCTGCAAGACATCTGGATACACCTTCA |
| | | acid | CCAACTACTATATGGTCTGGGTGCGACAGGCCCCTGGACAAGGA |
| | | sequence | CTTGAATGGATGGGCATAATCAAACCTAGTGGTGGTAACACGAT |
| | | | CTACGCACAGAAGTTCCAGGGCAGAGTCACCATGACCAGGGACA |
| | | | CGTCCACGAACACAGTCTATTTGGACCTGACCAGTCTGAGATCT |
| | | | GAGGACACGGCCGTGTATTATTGTGCGAGAACTGGGGATAGGGC |
| | | | TTTTGATGTCTGGGGCCACGGGACAATGGTCACCGTCTCTTCA |
| 2075 | YANG-2289 | VH domain | QMQLVQSGAEVKKPGASVKISCKTSGYTFTNYYMVWVRQAPGQG |
| | | amino | LEWMGIIKPSGGNTIYAQKFQGRVTMTRDTSTNTVYLDLTSLRS |
| | | acid | EDTAVYYCARTGDRAFDVWGHGTMVTVSS |
| | | sequence | |
| 2076 | YANG-2289 | HCDR1 | GYTFTNYY |
| 2077 | YANG-2289 | HCDR2 | IKPSGGNT |
| 2078 | YANG-2289 | HCDR3 | ARTGDRAFDV |
| 2079 | YANG-2289 | VL domain | CAGTCTGTGTTGACGCAGCCGCCCTCAGTGTCTGCGGCCCCAGG |
| | | nucleic | ACAGAAGGTCACCATCTCCTGCTCTGGAAGCAGCTCCAACATTG |
| | | acid | GAAATAATTATGTTTCCTGGTACCAGCAGTTCCCAGGAACAGCC |
| | | sequence | CCCAAACTCCTCATTTATGACAATAATAAGCGACCCTCAGGGAT |
| | | | TCCTGACCGATTCTCTGGCTCCAAGTCTGGCACGTCAGCCACCC |
| | | | TGGGCATCACCGGACTCCAGACTGGGGACGAGGCCGATTATTAC |
| | | | TGCGGAACATGGGATAGCAGCCTGGGTGCTGGGGTGTTCGGCGG |
| | | | AGGGACCAAGCTGACCGTCCTA |
| 2080 | YANG-2289 | VL domain | QSVLTQPPSVSAAPGQKVTISCSGSSSNIGNNYVSWYQQFPGTA |
| | | amino | PKLLIYDNNKRPSGIPDRFSGSKSGTSATLGITGLQTGDEADYY |
| | | acid | CGTWDSSLGAGVFGGGTKLTVL |
| | | sequence | |
| 2081 | YANG-2289 | LCDR1 | SSNIGNNY |
| 2082 | YANG-2289 | LCDR2 | DNN |
| 2083 | YANG-2289 | LCDR3 | GTWDSSLGAGV |
| 2084 | YANG-2290 | VH domain | CAGATGCAATTGGTGCAGTCTGGGACTGAGGTGAAGAAGCCTGG |
| | | nucleic | GGCCTCAGTGAAGATTTCCTGCAAGACATCTGGATACACCTTCA |
| | | acid | CCAACTACTATATGGTCTGGGTGCGACAGGCCCCTGGACAAGGA |
| | | sequence | CTTGAGTGGATGGGCATAATCAAACCTGGTGGTGGTAACACGAT |
| | | | CTACGCACAGAAATTCCAGGGCAGAGTCACCATGACCAGGGACA |
| | | | CGTCCACGAACACAGTCTATTTGGACCTGAACAGTCTGCGATCT |
| | | | GAGGACACGGCCGTGTATTATTGTGCGAGAACTGGTGATAGGGC |
| | | | TTTTGATGTCTGGGGCCACGGGACAGTGGTCACCGTCTCTTCA |
| 2085 | YANG-2290 | VH domain | QMQLVQSGTEVKKPGASVKISCKTSGYTFTNYYMVWVRQAPGQG |
| | | amino | LEWMGIIKPGGGNTIYAQKFQGRVTMTRDTSTNTVYLDLNSLRS |
| | | acid | EDTAVYYCARTGDRAFDVWGHGTVVTVSS |
| | | sequence | |
| 2086 | YANG-2290 | HCDR1 | GYTFTNYY |
| 2087 | YANG-2290 | HCDR2 | IKPGGGNT |
| 2088 | YANG-2290 | HCDR3 | ARTGDRAFDV |
| 2089 | YANG-2290 | VL domain | CAGTCTGTGTTGACGCAGCCGCCCTCAGTGTCTGCGGCCCCAGG |
| | | nucleic | ACAGAAGGTCACCATGTCCTGCTCTGGAAGCAGCTCCAACATTG |
| | | acid | GGAATAATTATGTTTCCTGGTACCAGCAGTTCCCAGGAACAGCC |
| | | sequence | CCCAAACTCCTCATCTATGACAATAATAAGCGACCCTCAGGGAT |
| | | | TCCTGACCGATTCTCTGGCTCCAAGTCTGGCACGTCAGCCACCC |
| | | | TGGGCATCACCGGACTCCAGACTGGGGACGAGGCCGATTATTAC |
| | | | TGCGGAACATGGGATAGCAGCCTGGGTGCTGGGGTGTTCGGCGG |
| | | | AGGGACCAAGCTGACCGTCCTA |
| 2090 | YANG-2290 | VL domain | QSVLTQPPSVSAAPGQKVTMSCSGSSSNIGNNYVSWYQQFPGTA |
| | | amino | PKLLIYDNNKRPSGIPDRFSGSKSGTSATLGITGLQTGDEADYY |
| | | acid | CGTWDSSLGAGVFGGGTKLTVL |
| | | sequence | |
| 2091 | YANG-2290 | LCDR1 | SSNIGNNY |
| 2092 | YANG-2290 | LCDR2 | DNN |
| 2093 | YANG-2290 | LCDR3 | GTWDSSLGAGV |
| 2094 | YANG-2291 | VH domain | CAGATTCAGTTGGTGCAGTCTGGGGCTGAGGTGAAGAAGCCTGG |
| | | nucleic | GGCCTCAGTGAAGTTTTCCTGCAAGACATCTGGATACACCTTCA |
| | | acid | CCAGCTACTATATGGTCTGGGTGCGACAGGCCCCTGGACAAGGA |
| | | sequence | CTTGAGTGGATGGGCATAATCAAACCTAGTGGTGGTAACACAAT |
| | | | CTACGCACAGAAGTTCCAGGGCAGAGTCACCATGACCAGGGACA |
| | | | CGTCCACGAACACAGTCTACATGGACCTGAGCAGTCTGAGATCT |
| | | | GAGGACACGGCCGTGTATTTTTGTGCGAGAACTGGGGATAGGGC |
| | | | TTTTGATGTCTGGGGCCACGGGACAATGATCACCGTCTCTTCA |
| 2095 | YANG-2291 | VH domain | QIQLVQSGAEVKKPGASVKFSCKTSGYTFTSYYMVWVRQAPGQG |
| | | amino | LEWMGIIKPSGGNTIYAQKFQGRVTMTRDTSTNTVYMDLSSLRS |
| | | acid | EDTAVYFCARTGDRAFDVWGHGTMITVSS |
| | | sequence | |
| 2096 | YANG-2291 | HCDR1 | GYTFTSYY |
| 2097 | YANG-2291 | HCDR2 | IKPSGGNT |
| 2098 | YANG-2291 | HCDR3 | ARTGDRAFDV |
| 2099 | YANG-2291 | VL domain | CAGTCTGTATTGACGCAGCCGCCCTCAGTGTCTGCGGCCCCAGG |
| | | nucleic | ACAGAAGGTCACCATCTCCTGCTCTGGAAGCAGCTCCAACATTG |
| | | acid | GAAATAATTTTGTATCCTGGTACCAACAGTTCCCAGGAACAGCC |
| | | sequence | CCCAAACTCCTCATTTATGACAATAATAAGCGACCCTCAGGGAT |
| | | | TCCTGACCGATTCTCTGGCTCCAAGTCTGGCACGTCAGCCACCC |
| | | | TGGGCATCACCGGACTCCAGACTGGGGACGAGGCCGATTATTAC |
| | | | TGCGGAACATGGGATAGCAGCCTGGGTGCTGGGGTGTTCGGCGG |
| | | | AGGGACCAAGCTGACCGTCCTA |
| 2100 | YANG-2291 | VL domain | QSVLTQPPSVSAAPGQKVTISCSGSSSNIGNNFVSWYQQFPGTA |
| | | amino | PKLLIYDNNKRPSGIPDRESGSKSGTSATLGITGLQTGDEADYY |
| | | acid | CGTWDSSLGAGVFGGGTKLTVL |
| | | sequence | |
| 2101 | YANG-2291 | LCDR1 | SSNIGNNF |
| 2102 | YANG-2291 | LCDR2 | DNN |
| 2103 | YANG-2291 | LCDR3 | GTWDSSLGAGV |
| 2104 | YANG-2292 | VH domain | CAGATGCAATTGGTGCAGTCTGGGGCTGAGGTGAAGAAGCCTGG |
| | | nucleic | GGCCTCAGTGAAGATCTCCTGCAAGACATCTGGATACACCTTCA |
| | | acid | TCAACTATTATATGGTCTGGGTGCGACAGGCCCCGGGACAAGGA |
| | | sequence | CTTGAGTGGATGGGCATAATCAAACCCAGTGGTGGTAACACGAT |
| | | | CTACGCACAGAAGTTCCAGGGCAGAGTCACCATGACCAGGGACA |
| | | | CGTCCACGAACACAGTCTATTTGGACCTGAGCAGTCTGAGATCT |
| | | | GAGGACACGGCCGTGTATTATTGTGCGAGAACTGGAGATAGGGC |
| | | | TTTTGATGTCTGGGGCCACGGGACAATGGTCACCGTCTCTTCA |
| 2105 | YANG-2292 | VH domain | QMQLVQSGAEVKKPGASVKISCKTSGYTFINYYMVWVRQAPGQG |
| | | amino | LEWMGIIKPSGGNTIYAQKFQGRVTMTRDTSTNTVYLDLSSLRS |
| | | acid | EDTAVYYCARTGDRAFDVWGHGTMVTVSS |
| | | sequence | |
| 2106 | YANG-2292 | HCDR1 | GYTFINYY |
| 2107 | YANG-2292 | HCDR2 | IKPSGGNT |
| 2108 | YANG-2292 | HCDR3 | ARTGDRAFDV |
| 2109 | YANG-2292 | VL domain | CAGTCTGTGTTGACGCAGCCGCCCTCAGTGTCTGCGGCCCCAGG |
| | | nucleic | ACAGAAGGTCACCATCTCCTGCTCTGGAAGCAGCTCCAACATTG |
| | | acid | GGAATAATTATGTTTCCTGGTACCAGCAGTTCCCAGGAACAGCC |
| | | sequence | CCCAAACTCCTCATTTATGACAATAATAAGCGACCCTCAGGGAT |
| | | | TCCTGACCGATTCTCTGGCTCCAAGTCTGGCACGTCAGCCACCC |
| | | | TGGGCATCACCGGACTCCAGACTGGGGACGAGGCCGATTATTAC |
| | | | TGCGGAACATGGGATAGCAGCCTGGGTGCTGGGGTGTTCGGCGG |
| | | | AGGGACCAAGCTGACCGTCCTA |
| 2110 | YANG-2292 | VL domain | QSVLTQPPSVSAAPGQKVTISCSGSSSNIGNNYVSWYQQFPGTA |
| | | amino | PKLLIYDNNKRPSGIPDRESGSKSGTSATLGITGLQTGDEADYY |
| | | acid | CGTWDSSLGAGVFGGGTKLTVL |
| | | sequence | |
| 2111 | YANG-2292 | LCDR1 | SSNIGNNY |
| 2112 | YANG-2292 | LCDR2 | DNN |
| 2113 | YANG-2292 | LCDR3 | GTWDSSLGAGV |
| 2114 | YANG-2293 | VH domain | CAGATGCAATTGCTGCAGTCTGGGGCTGAGGTGAAGAAGCCTGG |
| | | nucleic | GGCCTCAGCGAAGATTTCCTGCAAGACATCTGGATATACCTTCA |
| | | acid | CCAACTACTATATGGTCTGGGTGCGACAGGCTCCTGGACAAGGA |
| | | sequence | CTTGAGTGGATGGGCATAATCAAACCTAGTGGTGGTAACACGAT |
| | | | CTACGCACAGAAGTGCCAGGGCAGAGTCACCATGACCAGGGACA |
| | | | CGTCCACGAACACAGTCTATTTGGACCTGAACAGTCTGAGATCT |
| | | | GAGGACACGGCCGTTTATTATTGTGCGAGAACTGGGGATAGGGC |
| | | | TTTTGATTTCTGGGGCCACGGGACAATGGTCACCGTCTCTTCA |
| 2115 | YANG-2293 | VH domain | QMQLLQSGAEVKKPGASAKISCKTSGYTFTNYYMVWVRQAPGQG |
| | | amino | LEWMGIIKPSGGNTIYAQKCQGRVTMTRDTSTNTVYLDLNSLRS |
| | | acid | EDTAVYYCARTGDRAFDFWGHGTMVTVSS |
| | | sequence | |
| 2116 | YANG-2293 | HCDR1 | GYTFTNYY |
| 2117 | YANG-2293 | HCDR2 | IKPSGGNT |
| 2118 | YANG-2293 | HCDR3 | ARTGDRAFDE |
| 2119 | YANG-2293 | VL domain | CAGTCTGTGTTGACGCAGCCGCCCTCAGTGTCTGCGGCCCCAGG |
| | | nucleic | ACAGAAGGTCACCATCTCCTGCTCTGGAAGCAGCTCCAACATTG |
| | | acid | GGAATAATTATGTTTCCTGGTATCACCAGTTCCCAGGAACAGCC |
| | | sequence | CCCAAACTCCTCATTTATGACAATAATAAGCGACCCTCAGGGAT |
| | | | TCCTGACCGATTCTCTGGCTCCAAGTCTGGCACGTCAGCCACCC |
| | | | TGGGCATCACCGGACTCCAGACTGGGGACGAGGCCGATTATTAT |
| | | | TGCGGAACATGGGATAGCAGCCTGGGTGCTGGGGTGTTCGGCGG |
| | | | AGGGACCAAGCTGACCGTCCTA |
| 2120 | YANG-2293 | VL domain | QSVLTQPPSVSAAPGQKVTISCSGSSSNIGNNYVSWYHQFPGTA |
| | | amino | PKLLIYDNNKRPSGIPDRFSGSKSGTSATLGITGLQTGDEADYY |
| | | acid | CGTWDSSLGAGVFGGGTKLTVL |
| | | sequence | |
| 2121 | YANG-2293 | LCDR1 | SSNIGNNY |
| 2122 | YANG-2293 | LCDR2 | DNN |
| 2123 | YANG-2293 | LCDR3 | GTWDSSLGAGV |
| 2124 | YANG-2294 | VH domain | CAGATTCAGTTGGTGCAGTCTGGGGCTGAGGCGAAGAAGCCAGG |
| | | nucleic | GGCCCCAGTGAAGTTTTCTGGCAAGACATCTGGATACAACTTCA |
| | | acid | CCAACTACTACATGGNCTGTGTGCGACAGGCCCCTGAACAGGGA |
| | | sequence | CTTTAGTGGATGGGCATAATTAAACCTAGCGGTGGTAACACAAT |
| | | | CTCCGCACAGAAGTACCAGGGCAGAGTCACCATGACCAGGGACA |
| | | | CGTCCACGAACACAGTCTACATGGACCAGAACAGTCTGAGATCT |
| | | | GAGGACACGGCCGTCTATTATTGTGCGAGAACTGGAGATAGGGC |
| | | | TTTTGATGTCTGGGGCCACGGGACAATGGTCACCGTGTCTTCA |
| | | | (N = unknown base) |
| 2125 | YANG-2294 | VH domain | QIQLVQSGAEAKKPGAPVKFSGKTSGYNFTNYYMXCVRQAPEQG |
| | | amino | LXWMGIIKPSGGNTISAQKYQGRVTMTRDTSTNTVYMDQNSLRS |
| | | acid | EDTAVYYCARTGDRAFDVWGHGTMVTVSS |
| | | sequence | (X = unknown amino acid) |
| 2126 | YANG-2294 | HCDR1 | GYNFTNYY |
| 2127 | YANG-2294 | HCDR2 | IKPSGGNT |
| 2128 | YANG-2294 | HCDR3 | ARTGDRAFDV |
| 2129 | YANG-2294 | VL domain | CAGTCTGTGTTGACGCAGCCGCCCTCAGTGTCTGCGGCCCCAGG |
| | | nucleic | ACAGAAGGTCACCATCTCCTGCTCTGGAAGCAGCTCCAACATTG |
| | | acid | GGAATAATTATGTATCCTGGTACCAGCAGTTCCCAGGAACAGCC |
| | | sequence | CCCAAACTCCTCATTTATGACAATAATAAGCGACCCTCAGGGAT |
| | | | TCCTGACCGATTCTCTGGCTCCAAGTCTGGCACGTCAGCCACCC |
| | | | TGGGCATCACCGGGCTCCAGACTGGGGACGAGGCCGATTATTAC |
| | | | TGCGGAACATGGGATAGCAGCCTGGGTGCTGGGGTGTTCGGCGG |
| | | | AGGGACCAAACTGACCGTCCTA |
| 2130 | YANG-2294 | VL domain | QSVLTQPPSVSAAPGQKVTISCSGSSSNIGNNYVSWYQQFPGTA |
| | | amino | PKLLIYDNNKRPSGIPDRFSGSKSGTSATLGITGLQTGDEADYY |
| | | acid | CGTWDSSLGAGVFGGGTKLTVL |
| | | sequence | |
| 2131 | YANG-2294 | LCDR1 | SSNIGNNY |
| 2132 | YANG-2294 | LCDR2 | DNN |
| 2133 | YANG-2294 | LCDR3 | GTWDSSLGAGV |
| 2134 | YANG-2295 | VH domain | CAGATGCAGCTGGTGCAGTCTGGGGCTGAGGTGAAGAAGCCTGG |
| | | nucleic | GGCCTCAGTGAGGTTTTCCTGCAAGACATCTGGATACACCTTCA |
| | | acid | CCAGTTACTATATGGTCTGGGTGCGACAGGCCCCTGGACAAGGA |
| | | sequence | CTTGAATGGATGGGCATAATCAAACCTAGTGGTGGTAACACAAT |
| | | | CTACGCACAGAAGTTCCAGGGCAGAGTCACCATGACCAGGGACA |
| | | | CGTCCACGAATACAGTCTACATGGACCTGAGGAGTCTGAGCTCT |
| | | | GAGGACACGGCCGTGTATTATTGTGCGAGAACTGGGGATAGGGC |
| | | | TTTTGATGTCTGGGGCCAAGGGACAATGGTCACCGTCTCTTCA |
| 2135 | YANG-2295 | VH domain | QMQLVQSGAEVKKPGASVRFSCKTSGYTFTSYYMVWVRQAPGQG |
| | | amino | LEWMGIIKPSGGNTIYAQKFQGRVTMTRDTSTNTVYMDLRSLSS |
| | | acid | EDTAVYYCARTGDRAFDVWGQGTMVTVSS |
| | | sequence | |
| 2136 | YANG-2295 | HCDR1 | GYTFTSYY |
| 2137 | YANG-2295 | HCDR2 | IKPSGGNT |
| 2138 | YANG-2295 | HCDR3 | ARTGDRAFDV |
| 2139 | YANG-2295 | VL domain | CAGTCTGTGTTGACGCAGCCGCCCTCAGTGTCTGCGGTCCCAGG |
| | | nucleic | ACAGAAGGTCACCATCTCCTGCTCTGGAAGCAGCTCCAACATTG |
| | | acid | GGAATAATTTTGTATCCTGGTACCTGCAGTTCCCAGGAACAGCC |
| | | sequence | CCCAAACTCCTCATTTATGACAATAATAAGCGACCCTCAGGGAT |
| | | | TCCTGACCGATTCTCTGGCTCCAAGTCTGCCACGTCAGCCACCC |
| | | | TGGGCATCACCGGACTCCAGACTGGGGACGAGGCCGATTATTAT |
| | | | TGCGGAACATGGGACAGCAGCCTGGGTGCTGGGGTGTTCGGCGG |
| | | | AGGGACCCAGCTGACCGTCCTA |
| 2140 | YANG-2295 | VL domain | QSVLTQPPSVSAVPGQKVTISCSGSSSNIGNNFVSWYLQFPGTA |
| | | amino | PKLLIYDNNKRPSGIPDRESGSKSATSATLGITGLQTGDEADYY |
| | | acid | CGTWDSSLGAGVFGGGTQLTVL |
| | | sequence | |
| 2141 | YANG-2295 | LCDR1 | SSNIGNNF |
| 2142 | YANG-2295 | LCDR2 | DNN |
| 2143 | YANG-2295 | LCDR3 | GTWDSSLGAGV |
| 2144 | YANG-2296 | VH domain | CAGATTCAGTTGGTGCAGTCTGGGGCTGAGGTGAAGAAGCCTGG |
| | | nucleic | GGCCTCAGTGAAGTTTTCCTGCAAGACATCTGGATACACCTTCA |
| | | acid | CCAGCTACTATATGGTCTGGGTGCGACAGGCCCCTGGACAAGGA |
| | | sequence | CTTGAGTGGATGGGCATAATCAAACCTAGTGGTGGTAACACAAT |
| | | | CTACGCACAGAAGTTCCAGGGCAGAGTCACCATGACCAGGGACA |
| | | | CGTCCACGAACACAGTCTACATGGACCTGAACAGTCTGAGATCT |
| | | | GAAGACACGGCCGTGTATTATTGTGCGAGAACTGGGGATAGGGC |
| | | | TTTTGATGTCTGGGGCCACGGGACAATGATCACCGTCTCTTCA |
| 2145 | YANG-2296 | VH domain | QIQLVQSGAEVKKPGASVKFSCKTSGYTFTSYYMVWVRQAPGQG |
| | | amino | LEWMGIIKPSGGNTIYAQKFQGRVTMTRDTSTNTVYMDLNSLRS |
| | | acid | EDTAVYYCARTGDRAFDVWGHGTMITVSS |
| | | sequence | |
| 2146 | YANG-2296 | HCDR1 | GYTFTSYY |
| 2147 | YANG-2296 | HCDR2 | IKPSGGNT |
| 2148 | YANG-2296 | HCDR3 | ARTGDRAFDV |
| 2149 | YANG-2296 | VL domain | CAGTCTGTGTTGACGCAGCCGCCCTCAGTGTCTGCGGCCCCAGG |
| | | nucleic | ACAGAAGGTCACCATCTCCTGCTCTGGAAGCAGCTCCAACATTG |
| | | acid | GGAATAATTTTGTATCCTGGTACCAACAGTTTCCAGGAACAGCC |
| | | sequence | CCCAAACTCCTCATTTATGACAATAATAAGCGACCCTCAGGGAT |
| | | | TCCTGACCGATTCTCTGGCTCCAAGTCTGGCACGTCAGCCACCC |
| | | | TGGGCATCACCGGACTCCAGACTGGGGACGAGGCCGATTATTAC |
| | | | TGCGGAACATGGGATAGCAGCCTGGGTGCTGGGGTGTTCGGCGG |
| | | | AGGGACCAAGCTGACCGTCCTA |
| 2150 | YANG-2296 | VL domain | QSVLTQPPSVSAAPGQKVTISCSGSSSNIGNNFVSWYQQFPGTA |
| | | amino | PKLLIYDNNKRPSGIPDRFSGSKSGTSATLGITGLQTGDEADYY |
| | | acid | CGTWDSSLGAGVFGGGTKLTVL |
| | | sequence | |
| 2151 | YANG-2296 | LCDR1 | SSNIGNNF |
| 2152 | YANG-2296 | LCDR2 | DNN |
| 2153 | YANG-2296 | LCDR3 | GTWDSSLGAGV |
| 2154 | YANG-2297 | VH domain | CAGATTCAGTTGGTGCAGTCTGGGGCTGAGGTGAAGAAGCCTGG |
| | | nucleic | GGCCTCAGTGAAGTTTTCCTGCAAGACATCTGGATACACCTTCA |
| | | acid | CCAACTACTATATGGTCTGGGTGCGACAGGCCCCTGGACAAGGA |
| | | sequence | CTTGAGTGGATGGGCATAATCAAACCTAGTGGTGGTAACACAAT |
| | | | CTACGCACAGAAGTTCCAGGGCAGAGTCACCATGACCAGGGACA |
| | | | CGTCCACGAACACAGTCTACATGGACCTGAACAGTCTGAGATCT |
| | | | GAGGACACGGCCGTCTATTATTGTGCGAGAACTGGAGATAGGGC |
| | | | TTTTGATGTCTGGGGCCACGGGACAATGGTCACCGTGTCTTCA |
| 2155 | YANG-2297 | VH domain | QIQLVQSGAEVKKPGASVKFSCKTSGYTFTNYYMVWVRQAPGQG |
| | | amino | LEWMGIIKPSGGNTIYAQKFQGRVTMTRDTSTNTVYMDLNSLRS |
| | | acid | EDTAVYYCARTGDRAFDVWGHGTMVTVSS |
| | | sequence | |
| 2156 | YANG-2297 | HCDR1 | GYTFTNYY |
| 2157 | YANG-2297 | HCDR2 | IKPSGGNT |
| 2158 | YANG-2297 | HCDR3 | ARTGDRAFDV |
| 2159 | YANG-2297 | VL domain | CAGTCTGTGTTGACGCAGCCGCCCTCAGTGTCTGCGGCCCCAGG |
| | | nucleic | ACAGAAGGTCACCATCTCCTGCTCTGGAAGCAGCTCCAACATTG |
| | | acid | GGAATAATTATGTATCCTGGTACCAGCAGTTCCCAGGAACAGCC |
| | | sequence | CCCAAACTCCTCATTTATGACAATAATAAGCGACCCTCAGGGAT |
| | | | TCCTGACCGATTCTCTGGCTCCAAGTCTGGCACGTCAGCCACCC |
| | | | TGGGCATCACCGGACTCCAGACTGGGGACGAGGCCGATTATTAC |
| | | | TGCGGAACATGGGATAGCAGCCTGGGTGCTGGGGTGTTCGGCGG |
| | | | AGGGACCAAACTGACCGTCCTA |
| 2160 | YANG-2297 | VL domain | QSVLTQPPSVSAAPGQKVTISCSGSSSNIGNNYVSWYQQFPGTA |
| | | amino | PKLLIYDNNKRPSGIPDRFSGSKSGTSATLGITGLQTGDEADYY |
| | | acid | CGTWDSSLGAGVFGGGTKLTVL |
| | | sequence | |
| 2161 | YANG-2297 | LCDR1 | SSNIGNNY |
| 2162 | YANG-2297 | LCDR2 | DNN |
| 2163 | YANG-2297 | LCDR3 | GTWDSSLGAGV |
| 2164 | YANG-2298 | VH domain | CAGATGAAGTTGGTGCAGTCTGGGGCTGAGGTGAAGAAGCCTGG |
| | | nucleic | GGCCTCAGTGAAGATTTCCTGTAAGACATCTGGATACACCTTCA |
| | | acid | TCAACTACTATATGGTCTGGGTGCGACAGGCCCCTGGACAAGGA |
| | | sequence | CTTGAGTGGATGGGCATAATCAAACCTAGTGGTGGTAATACGAT |
| | | | CTACGCACAGAAGTTCCAGGGCAGAGTCACCATGACCAGGGACA |
| | | | CGTCCACGAACACAGTCTATATGGACCTGAGCAGTCTGAGATCT |
| | | | GAGGACACGGCCGTGTATTATTGTGCGAGAACTGGAGATAGGGC |
| | | | TTTTGATGTCTGGGGCCACGGGACAATGGTCACCGTCTCTTCA |
| 2165 | YANG-2298 | VH domain | QMKLVQSGAEVKKPGASVKISCKTSGYTFINYYMVWVRQAPGQG |
| | | amino | LEWMGIIKPSGGNTIYAQKFQGRVTMTRDTSTNTVYMDLSSLRS |
| | | acid | EDTAVYYCARTGDRAFDVWGHGTMVTVSS |
| | | sequence | |
| 2166 | YANG-2298 | HCDR1 | GYTFINYY |
| 2167 | YANG-2298 | HCDR2 | IKPSGGNT |
| 2168 | YANG-2298 | HCDR3 | ARTGDRAFDV |
| 2169 | YANG-2298 | VL domain | CAGTCTGTGTTGACGCAGCCGCCCTCAGTGTCTGCGGCCCCAGG |
| | | nucleic | ACAGAAGGTCACCATCTCCTGCTCTGGAAGCAACTCCAACATTG |
| | | acid | GGAATAATTATGTTTCCTGGTACCAGCAGTTCCCAGGAACAGCC |
| | | sequence | CCCAAACTCCTCATTTATGACAATCATAAGCGACCCTCAGGGAT |
| | | | TCCTGACCGATTCTCTGCCTCCAAGTCTGGCACGTCAGCCACCC |
| | | | TGGGCATCACCGGACTCCAGACTGGGGACGAGGCCGATTATTAC |
| | | | TGCGGAACATGGGATAGCGGCCTGGGTGCTGGGGTGTTCGGCGG |
| | | | AGGGACCAAGCTGACCGTCCTA |
| 2170 | YANG-2298 | VL domain | QSVLTQPPSVSAAPGQKVTISCSGSNSNIGNNYVSWYQQFPGTA |
| | | amino | PKLLIYDNHKRPSGIPDRFSASKSGTSATLGITGLQTGDEADYY |
| | | acid | CGTWDSGLGAGVFGGGTKLTVL |
| | | sequence | |
| 2171 | YANG-2298 | LCDR1 | NSNIGNNY |
| 2172 | YANG-2298 | LCDR2 | DNH |
| 2173 | YANG-2298 | LCDR3 | GTWDSGLGAGV |
| 2174 | YANG-2299 | VH domain | CAGATGCAGTTGGTGCAGTCTGGGGCTGAGGTGAAGAAGCCTGG |
| | | nucleic | GGCCTCAGTGAAGTTTTCCTGCAAGACATCTGGATACACCTTCA |
| | | acid | CCAATTATTATATGGTCTGGGTGCGACAGGCCCCTGGACAAGGA |
| | | sequence | CTTGAATGGATGGGCATAATCAAACCTAGTGGTGGTAACACAAT |
| | | | CTACGCACAGAAGTTCCAGGGCAGAGTCACCATGACCAGGGACA |
| | | | CGTCCACGAATACAGTCTATATGGACCTGAGGAGTCTGAGATCT |
| | | | GAGGACACGGCCGTGTATTATTGTGCGAGAACTGGGGATAGGGC |
| | | | TTTTGATGTCTGGGGCCAAGGGACAATGGTCACCGTCTCTTCA |
| 2175 | YANG-2299 | VH domain | QMQLVQSGAEVKKPGASVKFSCKTSGYTFTNYYMVWVRQAPGQG |
| | | amino | LEWMGIIKPSGGNTIYAQKFQGRVTMTRDTSTNTVYMDLRSLRS |
| | | acid | EDTAVYYCARTGDRAFDVWGQGTMVTVSS |
| | | sequence | |
| 2176 | YANG-2299 | HCDR1 | GYTFTNYY |
| 2177 | YANG-2299 | HCDR2 | IKPSGGNT |
| 2178 | YANG-2299 | HCDR3 | ARTGDRAFDV |
| 2179 | YANG-2299 | VL domain | CAGTCTGTGTTGACGCAGCCGCCCTCAGTGTCTGCGGCCCCAGG |
| | | nucleic | ACAGAAGGTCACCATCTCCTGCTCTGGAAGCAGTTCCAATATTG |
| | | acid | GGAATAATTTTGTATCCTGGTACCTGCAGTTCCCAGGAACAGCC |
| | | sequence | CCCAAACTCCTCATTTATGACAATAATAAGCGACCCTCAGGGAT |
| | | | TCCTGACCGATTCTCTGGCTCCAAGTCTGGCACGTCAGCCACCC |
| | | | TGGGCATCACCGGACTCCAGACTGGGGACGAGGCCGATTATTAC |
| | | | TGCGGAACATGGGATAGCAGCCTGGGTGCTGGGGTGTTCGGCGG |
| | | | AGGGACCCAGCTGACCGTCCTA |
| 2180 | YANG-2299 | VL domain | QSVLTQPPSVSAAPGQKVTISCSGSSSNIGNNFVSWYLQFPGTA |
| | | amino | PKLLIYDNNKRPSGIPDRFSGSKSGTSATLGITGLQTGDEADYY |
| | | acid | CGTWDSSLGAGVFGGGTQLTVL |
| | | sequence | |
| 2181 | YANG-2299 | LCDR1 | SSNIGNNF |
| 2182 | YANG-2299 | LCDR2 | DNN |
| 2183 | YANG-2299 | LCDR3 | GTWDSSLGAGV |
| 2184 | YANG-2299a | VH domain | CAGATGCAGCTGGTGCAGTCTGGGGCTGAGGTGAAGAAGCCTGG |
| | | nucleic | GGCCTCAGTGAAGTTTTCCTGCAAGACATCTGGATACACCTTCA |
| | | acid | CCAGCTACTATATGGTCTGGGTGCGACAGGCCCCTGGACAAGGA |
| | | sequence | CTTGAGTGGATGGGCATAATCAAACCTAGTGGTGGTAACACAAT |
| | | | CTATGCACGGAAGTTCCAGGGCAGAGTCACCATGACCAGGGACA |
| | | | CGTCCACGAACACAGTCTACATGGACCTGAGCAGTCTGAGATCT |
| | | | GAGGACACGGCCGTGTATTATTGTGCGAGAACTGGGGATAGGGC |
| | | | TTTTGATGTCTGGGGCCAAGGGACATTGGTCACCGTCTCTTCA |
| 2185 | YANG-2299a | VH domain | QMQLVQSGAEVKKPGASVKFSCKTSGYTFTSYYMVWVRQAPGQG |
| | | amino | LEWMGIIKPSGGNTIYARKFQGRVTMTRDTSTNTVYMDLSSLRS |
| | | acid | EDTAVYYCARTGDRAFDVWGQGTLVTVSS |
| | | sequence | |
| 2186 | YANG-2299a | HCDR1 | GYTFTSYY |
| 2187 | YANG-2299a | HCDR2 | IKPSGGNT |
| 2188 | YANG-2299a | HCDR3 | ARTGDRAFDV |
| 2189 | YANG-2299a | VL domain | CAGTCTGTGTTGACGCAGCCGCCCTCAGTGTCTGCGGCCCCAGG |
| | | nucleic | ACAGAAGGTCACCATCTCCTGCTCTGGAAGCAGCTCCAACATTG |
| | | acid | GGAGTAATTATGTCTCCTGGTACCAGCAGCTCCCAGGAACAGCC |
| | | sequence | CCCAAACTCCTCATTTATGACAATAATAAGCGCCCCTCAGGGAT |
| | | | TCCTGACCGATTCTCTGGCTCCAAGTCTGGCACGTCAGCCACCC |
| | | | TGGGCATCACCGGACTCCAGACTGGGGACGAGGCCGATTATTAC |
| | | | TGCGGAACATGGGATAGCAGCCTGGGTGCTGGGGTGTTCGGCGG |
| | | | AGGGACCAAACTGACCGTCCTA |
| 2190 | YANG-2299a | VL domain | QSVLTQPPSVSAAPGQKVTISCSGSSSNIGSNYVSWYQQLPGTA |
| | | amino | PKLLIYDNNKRPSGIPDRFSGSKSGTSATLGITGLQTGDEADYY |
| | | acid | CGTWDSSLGAGVFGGGTKLTVL |
| | | sequence | |
| 2191 | YANG-2299a | LCDR1 | SSNIGSNY |
| 2192 | YANG-2299a | LCDR2 | DNN |
| 2193 | YANG-2299a | LCDR3 | GTWDSSLGAGV |
| 2194 | YANG-2299b | VH domain | CAGATACAACTGGTGCAGTCTGGGGCTGAGGTGAAGAAGCCTGG |
| | | nucleic | GGCCTCAGTGAAGTTTTCCTGCAAGACATCTGGATACACCTTCA |
| | | acid | CCAACTACTATATGGTCTGGGTGCGACAGGCCCCTGGACAAGGT |
| | | sequence | CTTGAGTGGATGGGCATAATCAAACCTAGTGGTGGTAACACAAT |
| | | | CTACGCACAGAACTTCCAGGGCAGAGTCACCATGACCAGGGACA |
| | | | CGTCCACGAACACAGTCTACATGGACCTGAGGAGTCTGAGATCT |
| | | | GGGGACACGGCCGTGTATTATTGTGCGAGAAGTGGTGATAGGGC |
| | | | TTTTGATGTCTGGGGCCAAGGGACAATGGTCACCGTCTCTTCA |
| 2195 | YANG-2299b | VH domain | QIQLVQSGAEVKKPGASVKFSCKTSGYTFTNYYMVWVRQAPGQG |
| | | amino | LEWMGIIKPSGGNTIYAQNFQGRVTMTRDTSTNTVYMDLRSLRS |
| | | acid | GDTAVYYCARSGDRAFDVWGQGTMVTVSS |
| | | sequence | |
| 2196 | YANG-2299b | HCDR1 | GYTFTNYY |
| 2197 | YANG-2299b | HCDR2 | IKPSGGNT |
| 2198 | YANG-2299b | HCDR3 | ARSGDRAFDV |
| 2199 | YANG-2299b | VL domain | CAGTCTGTGTTGACGCAGCCGCCCTCAGTGTCTGCGGCCCCAGG |
| | | nucleic | ACAGAAGGTCACCATCTCCTGCTCTGGAAGCAGCTCCAACATTG |
| | | acid | GGAATAATTTTGTATCCTGGTACCAGCAGTTCCCAGGAACAGCC |
| | | sequence | CCCAAACTCCTCATTTATGACAATAATAAGCGACCCTCAGGGAT |
| | | | TCCTGACCGATTCTCTGGCTCCAAGTCTGGCACGTCAGCCACCC |
| | | | TGGGCATCACCGGACTCCAGACTGGGGACGAGGCCGATTATTAC |
| | | | TGCGGAACATGGGATAGCAGCCTGGGTGCTGGGGTGTTCGGCGG |
| | | | AGGGACCAAGCTGACCGTCCTA |
| 2200 | YANG-2299b | VL domain | QSVLTQPPSVSAAPGQKVTISCSGSSSNIGNNFVSWYQQFPGTA |
| | | amino | PKLLIYDNNKRPSGIPDRFSGSKSGTSATLGITGLQTGDEADYY |
| | | acid | CGTWDSSLGAGVFGGGTKLTVL |
| | | sequence | |
| 2201 | YANG-2299b | LCDR1 | SSNIGNNF |
| 2202 | YANG-2299b | LCDR2 | DNN |
| 2203 | YANG-2299b | LCDR3 | GTWDSSLGAGV |
| 2204 | YANG-2299c | VH domain | CAGATACAGCTGGTGCAGTCTGGGGCTGAGGTGAAGAAGCCTGG |
| | | nucleic | GGCCTCAGTGAGGCTTTCCTGCAAGACATCTGGATACACCTTCA |
| | | acid | CCAACTACTATATGGTCTGGGTGCGACAGGCCCCTGGACAAGGA |
| | | sequence | CTTGAGTGGATGGGCATAATCAAACCGAGTGGTGGTAATACAAT |
| | | | CTACGCACAGAACTTCCAGGGCAGAGTCACCATGACCAGGGACA |
| | | | CGTCCACGAGAACAGTCTACATGGACCTGAGGAGTCTGAGATCT |
| | | | GAGGACACGGCCGTGTATTATTGTGCGAGAACTGGTGATAGGGC |
| | | | TTTTGATGTCTGGGGCCAAGGGACAATGGTCACCGTCTCTTTA |
| 2205 | YANG-2299c | VH domain | QIQLVQSGAEVKKPGASVRLSCKTSGYTFTNYYMVWVRQAPGQG |
| | | amino | LEWMGIIKPSGGNTIYAQNFQGRVTMTRDTSTRTVYMDLRSLRS |
| | | acid | EDTAVYYCARTGDRAFDVWGQGTMVTVSL |
| | | sequence | |
| 2206 | YANG-2299c | HCDR1 | GYTFTNYY |
| 2207 | YANG-2299c | HCDR2 | IKPSGGNT |
| 2208 | YANG-2299c | HCDR3 | ARTGDRAFDV |
| 2209 | YANG-2299c | VL domain | CAGTCTGTGTTGACGCAGCCGCCCTCAGTGTCTGCGGCCCCAGG |
| | | nucleic | ACAGAAGGTCACCATCTCCTGCTCTGGAAGCAGCTCCAACATTG |
| | | acid | GGAATAATTTTGTATCCTGGTACCAGCAGTTCCCAGGAACAGCC |
| | | sequence | CCCAAACTCCTCATTTATGACAATAATAAGCGACCCTCAGGGAT |
| | | | TCCTGACCGATTCTCTGGCTCCAAGTCTGGCACGTCAGCCACCC |
| | | | TGGGCATCACCGGACTCCAGACTGGGGACGAGGCCGAATATTAC |
| | | | TGCGGAACATGGGATAGCAGCCTGGGTGCTGGGGTGTTCGGCGG |
| | | | AGGGACCAAGCTGACCGTCCTA |
| 2210 | YANG-2299c | VL domain | QSVLTQPPSVSAAPGQKVTISCSGSSSNIGNNFVSWYQQFPGTA |
| | | amino | PKLLIYDNNKRPSGIPDRFSGSKSGTSATLGITGLQTGDEAEYY |
| | | acid | CGTWDSSLGAGVFGGGTKLTVL |
| | | sequence | |
| 2211 | YANG-2299c | LCDR1 | SSNIGNNF |
| 2212 | YANG-2299c | LCDR2 | DNN |
| 2213 | YANG-2299c | LCDR3 | GTWDSSLGAGV |
| 2214 | YANG-2299d | VH domain | CAGATGCAATTGGTGCAGTCTGGGGCTGAGGTGAAGAAGCCTGG |
| | | nucleic | GGCCTCAGTGAAGATTTCCTGCAAGACATCTGGATACACCTTCA |
| | | acid | CCAACTATTATATGGTCTGGGTGCGACAGGCCCCTGGACAAGGA |
| | | sequence | CTTGAGTGGATGGGCATAATCAAACCTAGTGGTGGTAACACGAT |
| | | | CTACGCACAGAAGTTCCAGGGCAGAGTCACCATGACCAGGGACA |
| | | | CGTCCACGAACACAGTCTATTTGGACCTGAGCAGTCTGAGATCT |
| | | | GAGGACACGGCCGTGTATTATTGTGCGAGAACTGGTGATAGGGC |
| | | | TTTTGATGTCTGGGGCCACGGGACAGTGGTCACCGTCTCTTCA |
| 2215 | YANG-2299d | VH domain | QMQLVQSGAEVKKPGASVKISCKTSGYTFTNYYMVWVRQAPGQG |
| | | amino | LEWMGIIKPSGGNTIYAQKFQGRVTMTRDTSTNTVYLDLSSLRS |
| | | acid | EDTAVYYCARTGDRAFDVWGHGTVVTVSS |
| | | sequence | |
| 2216 | YANG-2299d | HCDR1 | GYTFTNYY |
| 2217 | YANG-2299d | HCDR2 | IKPSGGNT |
| 2218 | YANG-2299d | HCDR3 | ARTGDRAFDV |
| 2219 | YANG-2299d | VL domain | CAGTCTGTGTTGACGCAGCCGCCCTCAGTGTCTGCGGCCCCAGG |
| | | nucleic | ACAGAAGGTCACCATCTCCTGCTCTGGAAGCAGCTCCAACATTG |
| | | acid | GGAATAATTATGTTTCCTGGTACCAGCAGTTCCCAGGAACAGCC |
| | | sequence | CCCAAACTCCTCATCTATGACAATAATAAGCGACCCTCAGGGAT |
| | | | TCCTGACCGATTCTCTGGCTCCAAGTCTGGCACGTCAGCCACCC |
| | | | TGGCCATCACCGGACTCCAGACTGGGGACGAGGCCGATTATTAC |
| | | | TGCGGAACATGGGATAGCAGCCTGGGTGTTGGGGTGTTCGGCGG |
| | | | AGGGACCAAACTGACCGTCCTA |
| 2220 | YANG-2299d | VL domain | QSVLTQPPSVSAAPGQKVTISCSGSSSNIGNNYVSWYQQFPGTA |
| | | amino | PKLLIYDNNKRPSGIPDRFSGSKSGTSATLAITGLQTGDEADYY |
| | | acid | CGTWDSSLGVGVFGGGTKLTVL |
| | | sequence | |
| 2221 | YANG-2299d | LCDR1 | SSNIGNNY |
| 2222 | YANG-2299d | LCDR2 | DNN |
| 2223 | YANG-2299d | LCDR3 | GTWDSSLGVGV |
| 2224 | YANG-2299e | VH domain | CAGATGCAGCTGGTACAGTCTGGGGCTGAGGTGAAGAAGCCTGG |
| | | nucleic | GGCCTCAGTGAAGTTTTCCTGCAAGACATCTGGATACACCTTCA |
| | | acid | CCAGCTATTATATGGTCTGGGTGCGACAGGCCCCTGGACAAGGA |
| | | sequence | CTTGAGTGGATGGGCATAATCAAACCTAGTGGTGGTAACACAAT |
| | | | CTATGCACAGAAGTTCCAGGGCAGAGTCACCATGACCAGGGACA |
| | | | CGTCCACGAACACAGTCTACATGGACCTGAGTAGTCTGAGATCT |
| | | | GAGGACACGGCCGTGTATTATTGTGCGAGAACTGGGGATAGGGC |
| | | | TTTTGATGTCTGGGGCCAAGGGACAATGGTCACCGTCTCTTCA |
| 2225 | YANG-2299e | VH domain | QMQLVQSGAEVKKPGASVKFSCKTSGYTFTSYYMVWVRQAPGQG |
| | | amino | LEWMGIIKPSGGNTIYAQKFQGRVTMTRDTSTNTVYMDLSSLRS |
| | | acid | EDTAVYYCARTGDRAFDVWGQGTMVTVSS |
| | | sequence | |
| 2226 | YANG-2299e | HCDR1 | GYTFTSYY |
| 2227 | YANG-2299e | HCDR2 | IKPSGGNT |
| 2228 | YANG-2299? | HCDR3 | ARTGDRAFDV |
| 2229 | YANG-2299? | VL domain | CAGTCTGTGTTGACGCAGCCGCCCTCAGTGTCTGCGGCCCCAGG |
| | | nucleic | ACAGAAGGTCACCATCTCCTGCTCTGGAAGCACCTCCAACATTG |
| | | acid | GGAGTAATTATGTCTCCTGGTACCAGCAGCTCCCAGGAACAGCC |
| | | sequence | CCCAAACTCCTCATTTATGACAATAATAAGCGCCCCTCAGGGAT |
| | | | TCCTGACCGATTCTCTGGCTCCAAGTCTGGCACGTCAGCCACCC |
| | | | TGGGCATCACCGGACTCCAGACTGGGGACGAGGCCGATTATTAC |
| | | | TGCGGAACATGGGATAGCAGCCTGGGTGCTGGGGTGTTCGGCGG |
| | | | AGGGACCAAACTGACCGTCCTA |
| 2230 | YANG-2299? | VL domain | QSVLTQPPSVSAAPGQKVTISCSGSTSNIGSNYVSWYQQLPGTA |
| | | amino | PKLLIYDNNKRPSGIPDRFSGSKSGTSATLGITGLQTGDEADYY |
| | | acid | CGTWDSSLGAGVFGGGTKLTVL |
| | | sequence | |
| 2231 | YANG-2299e | LCDR1 | TSNIGSNY |
| 2232 | YANG-2299e | LCDR2 | DNN |
| 2233 | YANG-2299e | LCDR3 | GTWDSSLGAGV |
| 2234 | YANG-2299f | VH domain | CAGATACAGCTGGTGCAGTCTGGGGCTGAGGTGAAGAAGCCTGG |
| | | nucleic | GGCCTCAGTGAAGTTTTCCTGCAAGACATCTGGATACACCTTCA |
| | | acid | CCAACTACTATATGGTCTGGGTGCGACAGGCCCCTGGGCAAGGA |
| | | sequence | CTTGAGTGGATGGGCATAATCAAACCTAGCGGTGGTAACACAAT |
| | | | CTACGCACAGAACTTCCAGGGCAGAGTCACCATGACCAGGGACA |
| | | | CGTCCACGAACACAGTCTACATGGACCTGAGGAGTCTGAGATCT |
| | | | GAGGACACGGCCGTGTATTATTGTGCGAGAACTGGCGATAGGGC |
| | | | TTTTGATGTCTGGGGCCAAGGGACAATGGTCACCGTCTCTTCA |
| 2235 | YANG-2299f | VH domain | QIQLVQSGAEVKKPGASVKFSCKTSGYTFTNYYMVWVRQAPGQG |
| | | amino | LEWMGIIKPSGGNTIYAQNFQGRVTMTRDTSTNTVYMDLRSLRS |
| | | acid | EDTAVYYCARTGDRAFDVWGQGTMVTVSS |
| | | sequence | |
| 2236 | YANG-2299f | HCDR1 | GYTFTNYY |
| 2237 | YANG-2299f | HCDR2 | IKPSGGNT |
| 2238 | YANG-2299f | HCDR3 | ARTGDRAFDV |
| 2239 | YANG-2299f | VL domain | CAGTCTGTGTTGACGCAGCCGCCCTCAGTGTCTGCGGCCCCAGG |
| | | nucleic | ACAGAAGGTCACCATCTCCTGCTCTGGAAGCAGCTCCAACATTG |
| | | acid | GGAATAATTTTGTATCCTGGTACCAGCAGTTCCCAGGAACAGCC |
| | | sequence | CCCAAACTCCTCATTTATGACAATAATAAGCGACCCTCAGGGAT |
| | | | TCCTGACCGATTCTCTGGCTCCAAGTCTGGCACGTCAGCCACCC |
| | | | TGGGCATCACCGGACTCCAGACTGGGGACGAGGCCGATTATTAC |
| | | | TGCGGAACATGGGATAGCAGCCTGGGTGCTGGGGTGTTCGGCGG |
| | | | AGGGACCAAGCTGACCGTCCTA |
| 2240 | YANG-2299f | VL domain | QSVLTQPPSVSAAPGQKVTISCSGSSSNIGNNFVSWYQQFPGTA |
| | | amino | PKLLIYDNNKRPSGIPDRFSGSKSGTSATLGITGLQTGDEADYY |
| | | acid | CGTWDSSLGAGVFGGGTKLTVL |
| | | sequence | |
| 2241 | YANG-2299f | LCDR1 | SSNIGNNF |
| 2242 | YANG-2299f | LCDR2 | DNN |
| 2243 | YANG-2299f | LCDR3 | GTWDSSLGAGV |
| 2244 | YANG-2299g | VH domain | CAGATACAACTGGTGCAGTCTGGGGCTGAGGTGAAGAAGCCTGG |
| | | nucleic | GGCCTCAGTGAAGTTTTCCTGCAAGACATCTGGATACACCTTCA |
| | | acid | CCAACTACTATATGGTGTGGGTGCGACAGGCCCCTGGACAAGGA |
| | | sequence | CTTGAGTGGATGGGCATAATCAAACCTAGTGGTGGTAACACAAT |
| | | | CTACGCACAGAACTTCCAGGGCAGAGTCACCATGACCAGGGACA |
| | | | CGTCCACGAACACAGTGTACTTGGACCTGAGGAGTCTGAGATCT |
| | | | GAGGACACGGCCGTGTATTATTGTGCGAGAACTGGTGATAGGGC |
| | | | TTTTGATGTCTGGGGCCAAGGGACAATGGTCACCGTCTCTTCA |
| 2245 | YANG-2299g | VH domain | QIQLVQSGAEVKKPGASVKFSCKTSGYTFTNYYMVWVRQAPGQG |
| | | amino | LEWMGIIKPSGGNTIYAQNFQGRVTMTRDTSTNTVYLDLRSLRS |
| | | acid | EDTAVYYCARTGDRAFDVWGQGTMVTVSS |
| | | sequence | |
| 2246 | YANG-2299g | HCDR1 | GYTFTNYY |
| 2247 | YANG-2299g | HCDR2 | IKPSGGNT |
| 2248 | YANG-2299g | HCDR3 | ARTGDRAFDV |
| 2249 | YANG-2299g | VL domain | CAGTCTGTGTTGACGCAGCCGCCCTCAGTGTCTGCGGCCCCAGG |
| | | nucleic | ACAGAAGGTCACCATCTCCTGCTCTGGAAGCAGCTCCAACATTG |
| | | acid | GGAATAATTTTGTATCCTGGTACCAGCAGTTCCCAGGAACAGCC |
| | | sequence | CCCAAACTCCTCATTTATGACAATAATAAGCGACCCTCAGGGAT |
| | | | TCCTGACCGATTCTCTGGCTCCAAGTCTGGCACGTCAGCCACCC |
| | | | TGGGCATCACCGGACTCCAGACTGGGGACGAGGCCGATTATTAC |
| | | | TGCGGAACATGGGATAGCAGCCTGGGTGCTGGGGTGTTCGGCGG |
| | | | AGGGACCAAGCTGACCGTCCTA |
| 2250 | YANG-2299g | VL domain | QSVLTQPPSVSAAPGQKVTISCSGSSSNIGNNFVSWYQQFPGTA |
| | | amino | PKLLIYDNNKRPSGIPDRESGSKSGTSATLGITGLQTGDEADYY |
| | | acid | CGTWDSSLGAGVFGGGTKLTVL |
| | | sequence | |
| 2251 | YANG-2299g | LCDR1 | SSNIGNNF |
| 2252 | YANG-2299g | LCDR2 | DNN |
| 2253 | YANG-2299g | LCDR3 | GTWDSSLGAGV |
| 2254 | YANG-2299h | VH domain | CAGATGCAATTGCTGCAGTCTGGGGCTGAGGTGAAGAAGCCTGG |
| | | nucleic | GGCCTCAGTGAAGATTTCCTGCAAGACATCTGGATACACCTTCA |
| | | acid | CCAACTACTATATGGTCTGGGTGCGACAGGCCCCTGGACAAGGA |
| | | sequence | CTTAAGTGGATGGGCATAATCAAACCTAGTGGTGGTAACACGAT |
| | | | CTACGCACAGAACTTCCAGGGCAGAGTCACCATGACCAGGGACA |
| | | | CGTCCACAAACACAATCTATTTGGACCTGAGCAGTCTGAGATCT |
| | | | GAGGACACGGCCGTATATTATTGTGCGAGAACTGGGGATAGGGC |
| | | | TTTTGATGTCTGGGGCCACGGGACAATGGTCACCGTCTCTTCA |
| 2255 | YANG-2299h | VH domain | QMQLLQSGAEVKKPGASVKISCKTSGYTFTNYYMVWVRQAPGQG |
| | | amino | LKWMGIIKPSGGNTIYAQNFQGRVTMTRDTSTNTIYLDLSSLRS |
| | | acid | EDTAVYYCARTGDRAFDVWGHGTMVTVSS |
| | | sequence | |
| 2256 | YANG-2299h | HCDR1 | GYTFTNYY |
| 2257 | YANG-2299h | HCDR2 | IKPSGGNT |
| 2258 | YANG-2299h | HCDR3 | ARTGDRAFDV |
| 2259 | YANG-2299h | VL domain | CAGTCTGTGTTGACGCAGCCGCCCTCAGTGTCTGCGGCCCCAGG |
| | | nucleic | ACAGAAGGTCACCATCTCCTGCTCTGGAAGCAGCTCCAACATTG |
| | | acid | GGAATAATTATGTTTCCTGGTATCAGCAGTTCCCAGGAACAGCC |
| | | sequence | CCCAAACTCCTCATTTATGACAATAATAAGCGACCCTCAGGGAT |
| | | | TCCTGACCGATTCTCTGGCTCCAAGTCTGGCACGTCAGCCACCC |
| | | | TGGGCATCACCGGACTCCAGACTGGGGACGAGGCCGATTATTAT |
| | | | TGCGGAACATGGGATAGCAGCCTGGGTGCTGGGGTGTTCGGCGG |
| | | | AGGGACCAAACTGACCGTCCTA |
| 2260 | YANG-2299h | VL domain | QSVLTQPPSVSAAPGQKVTISCSGSSSNIGNNYVSWYQQFPGTA |
| | | amino | PKLLIYDNNKRPSGIPDRFSGSKSGTSATLGITGLQTGDEADYY |
| | | acid | CGTWDSSLGAGVFGGGTKLTVL |
| | | sequence | |
| 2261 | YANG-2299h | LCDR1 | SSNIGNNY |
| 2262 | YANG-2299h | LCDR2 | DNN |
| 2263 | YANG-2299h | LCDR3 | GTWDSSLGAGV |
| 2264 | YANG-2299i | VH domain | CAGATGCAGTTGGTGCAGTCTGGGGCTGAGGTGAAGAAGCCTGG |
| | | nucleic | GGCCTCAGTGAAGATTTCCTGCAAGACATCTGGATACACCTTCA |
| | | acid | CCAATTACTATATGGTCTGGGTGCGACAGGCCCCTGGACAAGGA |
| | | sequence | CTTGAGTGGATGGGCATAATCAAACCTAGTGGTGGTAACACGAT |
| | | | CTACGCACAGAAGTTCCAGGGCAGAGTCACCATGACCAGGGACA |
| | | | CGTCCACGAACACAGTCTATATGGACCTGAACAGTCTGAGATCT |
| | | | GAGGACACGGCCGTATATTATTGTGCGAGAACTGGGGATAGGGC |
| | | | TTTTGATGTCTGGGGCCACGGGACAATGGTCACCGTCTCTTCA |
| 2265 | YANG-2299i | VH domain | QMQLVQSGAEVKKPGASVKISCKTSGYTFTNYYMVWVRQAPGQG |
| | | amino | LEWMGIIKPSGGNTIYAQKFQGRVTMTRDTSTNTVYMDLNSLRS |
| | | acid | EDTAVYYCARTGDRAFDVWGHGTMVTVSS |
| | | sequence | |
| 2266 | YANG-2299i | HCDR1 | GYTFTNYY |
| 2267 | YANG-2299i | HCDR2 | IKPSGGNT |
| 2268 | YANG-2299i | HCDR3 | ARTGDRAFDV |
| 2269 | YANG-2299i | VL domain | CAGTCTGTGTTGACGCAGCCGCCCTCAGTGTCTGCGGCCCCAGG |
| | | nucleic | ACAGAAGGTCACCATCTCCTGCTCTGGAAGCAGCTCCAATATTG |
| | | acid | GAACTAATTCTCTTTCCTGGTACCAGCAGTTCCCAGGAACAGCC |
| | | sequence | CCCAAACTCCTCATTTATGACAATAATAAACGACCCTCAGGGAT |
| | | | TCCTGACCGATTCTCTGGCTCCAAGTCTGGCACGTCAGCCACCC |
| | | | TGGGCATCACCGGACTCCAGACTGGGGACGAGGCCGATTATTAC |
| | | | TGCGGAACATGGGATAGCAGCCTGGGTGCTGGGGTGTTCGGCGG |
| | | | AGGGACCAAGGTGACCGTCCTA |
| 2270 | YANG-2299i | VL domain | QSVLTQPPSVSAAPGQKVTISCSGSSSNIGTNSLSWYQQFPGTA |
| | | amino | PKLLIYDNNKRPSGIPDRFSGSKSGTSATLGITGLQTGDEADYY |
| | | acid | CGTWDSSLGAGVFGGGTKVTVL |
| | | sequence | |
| 2271 | YANG-2299i | LCDR1 | SSNIGTNS |
| 2272 | YANG-2299i | LCDR2 | DNN |
| 2273 | YANG-2299i | LCDR3 | GTWDSSLGAGV |
| 2274 | YANG-2299j | VH domain | CAGATTCAGTTGGTGCAGTCTGGGGCTGAGGTGAAGAAGCCTGG |
| | | nucleic | GGCCTCAGTGAAGTTTTCCTGCAAGACATCTGGATACACCTTCA |
| | | acid | CCGGCTACTATATGGTCTGGGTGCGACAGGCCCCTGGACAAGGA |
| | | sequence | CTTGAGTGGATGGGCATAATCAAACCTAGTGGTGGTGACACAAT |
| | | | CTACGCACAGAAGTTCCAGGGCAGAGTCACCATGACCAGGGACA |
| | | | CGTCCACGAACACAGTCTACATGGACCTGAACAGTCTGAGATCT |
| | | | GAGGACACGGCCGTCTATTATTGTGCGAGAACTGGAGATAGGGC |
| | | | TTTTGATGTCTGGGGCCACGGGACAATGGTCACCGTGTCTTCA |
| 2275 | YANG-2299j | VH domain | QIQLVQSGAEVKKPGASVKFSCKTSGYTFTGYYMVWVRQAPGQG |
| | | amino | LEWMGIIKPSGGDTIYAQKFQGRVTMTRDTSTNTVYMDLNSLRS |
| | | acid | EDTAVYYCARTGDRAFDVWGHGTMVTVSS |
| | | sequence | |
| 2276 | YANG-2299j | HCDR1 | GYTFTGYY |
| 2277 | YANG-2299j | HCDR2 | IKPSGGDT |
| 2278 | YANG-2299j | HCDR3 | ARTGDRAFDV |
| 2279 | YANG-2299j | VL domain | CAGTCTGTGTTGACGCAGCCGCCCTCAGTGTCTGCGGCCCCAGG |
| | | nucleic | ACAGAAGGTCACCATCTCCTGCTCTGGAAGCAACTCCAACATTG |
| | | acid | GGAATAATTATGTATCCTGGTACCAGCAGTTCCCAGGAACAGCC |
| | | sequence | CCCAAACTCCTCATTTATGACAATAATAAGCGACCCTCAGGGAT |
| | | | TCCTGACCGATTCTCTGGCTCCAAGTCTGGCACGTCAGCCACCC |
| | | | TGGGCATCACCGGACTCCAGACTGGGGACGAGGCCGATTATTAC |
| | | | TGCGGAACATGGGATAGCAGCCTGGGTGCTGGGGTGTTCGGCGG |
| | | | AGGGACCAAACTGACCGTCCTA |
| 2280 | YANG-2299j | VL domain | QSVLTQPPSVSAAPGQKVTISCSGSNSNIGNNYVSWYQQFPGTA |
| | | amino | PKLLIYDNNKRPSGIPDRFSGSKSGTSATLGITGLQTGDEADYY |
| | | acid | CGTWDSSLGAGVFGGGTKLTVL |
| | | sequence | |
| 2281 | YANG-2299j | LCDR1 | NSNIGNNY |
| 2282 | YANG-2299j | LCDR2 | DNN |
| 2283 | YANG-2299j | LCDR3 | GTWDSSLGAGV |
| 2284 | YANG-2299k | VH domain | CAGATACAGCTGGTGCAGTCTGGGGCTGAGGTGAAGAAGCCTGG |
| | | nucleic | GGCCTCAGTGAAGTTTTCCTGCAAGACATCTGGATACACCTTCA |
| | | acid | CCAACTACTATATGGTCTGGGTGCGACAGGCCCCTGGACAAGGA |
| | | sequence | CTTGAGTGGATGGGCATAATCAAACCTAGTGGTGGTAACACAAT |
| | | | CTACGCACAGAGTTTCCAGGGCAGAGTCACCATGACCAGGGACA |
| | | | CGTCCACGAACACAGTCTACATGGACCTGAGGAGTCTGAGATCT |
| | | | GAGGACACGGCCGTGTATTATTGTGCGAGAACTGGTGATAGGGC |
| | | | TTTTGATGTCTGGGGCCAAGGGACAATGGTCACCGTCTCTTCA |
| 2285 | YANG-2299k | VH domain | QIQLVQSGAEVKKPGASVKFSCKTSGYTFTNYYMVWVRQAPGQG |
| | | amino | LEWMGIIKPSGGNTIYAQSFQGRVTMTRDTSTNTVYMDLRSLRS |
| | | acid | EDTAVYYCARTGDRAFDVWGQGTMVTVSS |
| | | sequence | |
| 2286 | YANG-2299k | HCDR1 | GYTFTNYY |
| 2287 | YANG-2299k | HCDR2 | IKPSGGNT |
| 2288 | YANG-2299k | HCDR3 | ARTGDRAFDV |
| 2289 | YANG-2299k | VL domain | CAGTCTGTGTTGACGCAGCCGCCCTCAGTGTCTGCGGCCCCAGG |
| | | nucleic | ACAGAAGGTCACCATCTCCTGCTCTGGAAGCAGCTCCAACATTG |
| | | acid | GGAATAATTTTGTATCCTGGTACCAGCAGTTCCCAGGAACAGCC |
| | | sequence | CCCAAACTCCTCATTTATGACAATAATAAGCGACCCTCAGGGAT |
| | | | TCCTGACCGATTCTCTGGCTCCAAGTCTGGCACGTCAGCCACCC |
| | | | TGGGCATCACCGGACTCCAGACTGGGGACGAGGCCGATTATTAC |
| | | | TGCGGAACATGGGATAGCAGCCTGGGTGCTGGGGTGTTCGGCGG |
| | | | AGGGACCAAGCTGACCGTCCTA |
| 2290 | YANG-2299k | VL domain | QSVLTQPPSVSAAPGQKVTISCSGSSSNIGNNFVSWYQQFPGTA |
| | | amino | PKLLIYDNNKRPSGIPDRFSGSKSGTSATLGITGLQTGDEADYY |
| | | acid | CGTWDSSLGAGVFGGGTKLTVL |
| | | sequence | |
| 2291 | YANG-2299k | LCDR1 | SSNIGNNF |
| 2292 | YANG-2299k | LCDR2 | DNN |
| 2293 | YANG-2299k | LCDR3 | GTWDSSLGAGV |
| 2294 | YANG-22991 | VH domain | CAGATACAGCTGGTGCAGTCTGGGGCTGAGGTGAAGAAGCCTGG |
| | | nucleic | GGCCTCAGTGAGGTTTTCCTGCAAGACATCTGGATACACCTTCA |
| | | acid | CCAACTACTATATGGTCTGGGTGCGACAGGCCCCTGGACAAGGG |
| | | sequence | CTTGAGTGGATGGGCATAATCAAACCTAGTGGTGGTGACACAAT |
| | | | CTACGCACAGAACTTCCAGGGCAGAGTCACCATGACCAGGGACA |
| | | | CGTCCACGAACTCAGTCTACATGGACCTGAGGAGTCTGAGATCT |
| | | | GAGGACACGGCCGTGTATTATTGTGCGAGAACTGGTGATAGGGC |
| | | | TTTTGATGTCTGGGGCCAAGGGACAATGGTCACCGTCTCTTCA |
| 2295 | YANG-22991 | VH domain | QIQLVQSGAEVKKPGASVRFSCKTSGYTFTNYYMVWVRQAPGQG |
| | | amino | LEWMGIIKPSGGDTIYAQNFQGRVTMTRDTSTNSVYMDLRSLRS |
| | | acid | EDTAVYYCARTGDRAFDVWGQGTMVTVSS |
| | | sequence | |
| 2296 | YANG-22991 | HCDR1 | GYTFTNYY |
| 2297 | YANG-22991 | HCDR2 | IKPSGGDT |
| 2298 | YANG-22991 | HCDR3 | ARTGDRAFDV |
| 2299 | YANG-22991 | VL domain | CAGTCTGTGTTGACGCAGCCGCCCTCAGTGTCTGCGGCCCCAGG |
| | | nucleic | ACAGAAGGTCACCATCTCCTGCTCTGGACGCAGCTCCAACATTG |
| | | acid | GGAATAATTTTGTATCCTGGTACCAACAGTTCCCAGGAACAGCC |
| | | sequence | CCCAAACTCCTCATTTATGACAATAATAAACGACCCTCAGGGAT |
| | | | TCCTGACCGATTCTCTGGCTCCAAGTCTGGCACGTCAGCCACCC |
| | | | TGGGCATCACCGGACTCCAGACTGGGGACGAGGCCGATTATTAC |
| | | | TGCGGAACATGGGATAGCAGCCTGGGTACTGGGGTGTTCGGCGG |
| | | | AGGGACCAAGCTGACCGTCCTA |
| 2300 | YANG-22991 | VL domain | QSVLTQPPSVSAAPGQKVTISCSGRSSNIGNNFVSWYQQFPGTA |
| | | amino | PKLLIYDNNKRPSGIPDRESGSKSGTSATLGITGLQTGDEADYY |
| | | acid | CGTWDSSLGTGVFGGGTKLTVL |
| | | sequence | |
| 2301 | YANG-22991 | LCDR1 | SSNIGNNF |
| 2302 | YANG-22991 | LCDR2 | DNN |
| 2303 | YANG-22991 | LCDR3 | GTWDSSLGTGV |
| 2304 | YANG-2301 | VH domain | CAGGTCCACCTGATACAATCTGGGGCTGAGGTGAAGAAGCCTGG |
| | | nucleic | GGCCTCAGTGAAGGTCTCCTGCAAGGTTTCCGGATACACCCTCA |
| | | acid | TTGAAGTATCCGTGCACTGGGTGCGACAGGCTCCTGGAAAAGGG |
| | | sequence | CTTGAGTGGATGGGAGGTTTTGATCCTGAAGCAGCTGAAACAAT |
| | | | CTACGCACAGAAATTCCAGGGCAGAGTCACCATGACCGAGGACA |
| | | | CATCTACAGACACAGCCTACATGGACCTGAGCAGCCTGAAATCT |
| | | | GAAGACTCGGCCGTATATTACTGTGCAATAGGACCAGCAGTGAC |
| | | | TGGTAGAAACTCCGGGGAATACTATTACTATTACGGTATGGACG |
| | | | TCTGGGGCCAAGGGACCACGGTCACCGTCGCCTCA |
| 2305 | YANG-2301 | VH domain | QVHLIQSGAEVKKPGASVKVSCKVSGYTLIEVSVHWVRQAPGKG |
| | | amino | LEWMGGFDPEAAETIYAQKFQGRVTMTEDTSTDTAYMDLSSLKS |
| | | acid | EDSAVYYCAIGPAVTGRNSGEYYYYYGMDVWGQGTTVTVAS |
| | | sequence | |
| 2306 | YANG-2301 | HCDR1 | GYTLIEVS |
| 2307 | YANG-2301 | HCDR2 | FDPEAAET |
| 2308 | YANG-2301 | HCDR3 | AIGPAVTGRNSGEYYYYYGMDV |
| 2309 | YANG-2301 | VL domain | GAAATAGTGATGACCCAGTCTCCAGCCACCCTGTCTGTGTCTCC |
| | | nucleic | AGGGGAAAGAGCCACCCTCTCTTGCAGGGCCAGTCAGAGTGTTA |
| | | acid | ACAGCAACTTGGCCTGGTACCAGCAGAAGCCTGGCCAGGCCCCC |
| | | sequence | AGGCTCCTCATCTATGCTGTATCCACCAGGGCCACTGGTCTCCC |
| | | | AGCCAGGTTCAGTGGCAGTGGGTCTGGGACAGAATTCACTCTCA |
| | | | CCATCAGCAGCCTGCAGTCTGAAGACTTTGTAGTTTATTACTGT |
| | | | CACCAGTATAATAACTGGCCGCTCACTTTCGGCGGAGGGACCAA |
| | | | GGTGGAGATCAAA |
| 2310 | YANG-2301 | VL domain | EIVMTQSPATLSVSPGERATLSCRASQSVNSNLAWYQQKPGQAP |
| | | amino | RLLIYAVSTRATGLPARFSGSGSGTEFTLTISSLQSEDFVVYYC |
| | | acid | HQYNNWPLTFGGGTKVEIK |
| | | sequence | |
| 2311 | YANG-2301 | LCDR1 | QSVNSN |
| 2312 | YANG-2301 | LCDR2 | AVS |
| 2313 | YANG-2301 | LCDR3 | HQYNNWPLT |
| 2314 | YANG-2302 | VH domain | CAGGTCCAACTGGTACAGTCTGGGGCTGAGGTGAGGAAGCCTGG |
| | | nucleic | GGCCTCAGTGAAGGTCTCCTGCAAGGTTTCCGGATACACCCTCC |
| | | acid | CTGAATTAGCCATACACTGGGTGCGACAGGCGCCTGGAAAAGGG |
| | | sequence | CTTGAGTGGATGGGGGGTTTTATTCCTGAAGATGGTGACACAAT |
| | | | CTACGCACAGAAGTTCCAGGGCAGAGTCACCATGACCGAGGACA |
| | | | CATCTACAGACACAGCCTACATGGACCTGACCAGCCTGAGATCT |
| | | | GAGGACGCGGCCGTGTATTACTGTACATCAGGCTGGGCAGCACC |
| | | | TGGATACAATTACGGAATGGCCGTCTGGGGCCAAGGGACCACGG |
| | | | TCACCGTCTCCTCA |
| 2315 | YANG-2302 | VH domain | QVQLVQSGAEVRKPGASVKVSCKVSGYTLPELAIHWVRQAPGKG |
| | | amino | LEWMGGFIPEDGDTIYAQKFQGRVTMTEDTSTDTAYMDLTSLRS |
| | | acid | EDAAVYYCTSGWAAPGYNYGMAVWGQGTTVTVSS |
| | | sequence | |
| 2316 | YANG-2302 | HCDR1 | GYTLPELA |
| 2317 | YANG-2302 | HCDR2 | FIPEDGDT |
| 2318 | YANG-2302 | HCDR3 | TSGWAAPGYNYGMAV |
| 2319 | YANG-2302 | VL domain | GAAGTTGTGTTGACGCAGTCTCCAGGCACTTTGTCTTTGTCTTC |
| | | nucleic | AGGGGAAAGAGCCACCCTCTCCTGCAGGGCCAGTCAGAGTGTTA |
| | | acid | GCAGTAACTACTTAGCCTGGTACCAGAAGAAACCTGGCCAGGCT |
| | | sequence | CCCAGGCTCCTCATTTATGGTGCATCCAGCAGGGTCACTGGCAT |
| | | | CCCAGACAGGTTCGGTGGCAGTGGGTCTGGGACAGACTTCACTC |
| | | | TCACCATCAGCAGACTGGAGCCTGAAGATTTTGCAGTGTATTAC |
| | | | TGTCAACAATATGATGCCTCACCGTACAGTTTTGGCCAGGGGAC |
| | | | CAAGCTGGACATCAAA |
| 2320 | YANG-2302 | VL domain | EVVLTQSPGTLSLSSGERATLSCRASQSVSSNYLAWYQKKPGQA |
| | | amino | PRLLIYGASSRVTGIPDRFGGSGSGTDFTLTISRLEPEDFAVYY |
| | | acid | CQQYDASPYSFGQGTKLDIK |
| | | sequence | |
| 2321 | YANG-2302 | LCDR1 | QSVSSNY |
| 2322 | YANG-2302 | LCDR2 | GAS |
| 2323 | YANG-2302 | LCDR3 | QQYDASPYS |
| 2324 | YANG-2303 | VH domain | CAGGTCCAGTTGGTACAGTCTGGGGCTGAGGTGAAGAAGCCTGG |
| | | nucleic | GGCCTCAGTGAGGGTCTCCTGCAAGGTTTCCGGATACACCCTCC |
| | | acid | CTGAATTAGCCATACACTGGGTGCGACAGGCTCCTGGAAAAGGG |
| | | sequence | CTTGAGTGGATGGGAGGTTTTGATCCTGAGGATGGTGAGACAAT |
| | | | CTACGCACAGAAGTTCCAGGGTAGAGTCATCATGACCGAGGACA |
| | | | CATCCACAGACACAGCCTACATGGACCTGAGCAGCCTGAGATCT |
| | | | GAGGACACGGCCGTGTATTACTGTGTAAAAACCTGGGCAGCGCC |
| | | | CGGATATAATTACGGTTTGGACACCTGGGGCCAAGGGACCACGG |
| | | | TCACCGTCTCCTCA |
| 2325 | YANG-2303 | VH domain | QVQLVQSGAEVKKPGASVRVSCKVSGYTLPELAIHWVRQAPGKG |
| | | amino | LEWMGGFDPEDGETIYAQKFQGRVIMTEDTSTDTAYMDLSSLRS |
| | | acid | EDTAVYYCVKTWAAPGYNYGLDTWGQGTTVTVSS |
| | | sequence | |
| 2326 | YANG-2303 | HCDR1 | GYTLPELA |
| 2327 | YANG-2303 | HCDR2 | FDPEDGET |
| 2328 | YANG-2303 | HCDR3 | VKTWAAPGYNYGLDT |
| 2329 | YANG-2303 | VL domain | GAAATTGTGTTGACGCAGTCTCCAGGCATCCTGTCTTTGTCTCC |
| | | nucleic | AGGGGAAAGTGCCACCCTCTCCTGCAGGGCCAGTCAGAGTATTG |
| | | acid | CCAGCAACTACTTAGCCTGGTTCCAGCAGAAACCTGGCCAGGCT |
| | | sequence | CCCAGGCTCCTCATCTATGGTGCATCCAGCAGGGCCGCTGGCTT |
| | | | CCCAGACAGGTTCAGTGGCAGTGGGTCTGGGACAGACTTCACTC |
| | | | TCACCATCAAGAGACTGGAGCCTGAAGATTCTGCAGTGTATTAT |
| | | | TGTCAGCACTATGGTAGCTCACCGTGCAGTTTTGGCCAGGGGAC |
| | | | CAACCTGGAGATCAAA |
| 2330 | YANG-2303 | VL domain | EIVLTQSPGILSLSPGESATLSCRASQSIASNYLAWFQQKPGQA |
| | | amino | PRLLIYGASSRAAGFPDRFSGSGSGTDFTLTIKRLEPEDSAVYY |
| | | acid | CQHYGSSPCSFGQGTNLEIK |
| | | sequence | |
| 2331 | YANG-2303 | LCDR1 | QSIASNY |
| 2332 | YANG-2303 | LCDR2 | GAS |
| 2333 | YANG-2303 | LCDR3 | QHYGSSPCS |
| 2334 | YANG-2304 | VH domain | CAGGTCCAGCTGGTACAGTCTGGGACTGAAGTGAAGAAGCCTGG |
| | | nucleic | GGCCTCAGTGAAGGTCTCCTGCAAGGTTTCCGGATACACCCTCC |
| | | acid | CTGAATTGGCCATTCACTGGGTGCGACAGGCTCCTGGAAAAGGG |
| | | sequence | CTTGAGTGGATGGGAACTTTTGATCCTGAAGATGGTGAAACAAT |
| | | | CTGCGCACAGAAGTTCCAGGGCAGAGTCACCATGACCGAGGACA |
| | | | CATCTACAGACACAGCCTACATGGACCTGAGCAGCCTCAGATCT |
| | | | GAGGACACGGCCGTTTATTACTGTGCAACAACGTCGATTATAGC |
| | | | AGCTCGGTGGTGGTTCGACCCCTGGGGCCAGGGAACCCTGGTCA |
| | | | CCGTCTCCTCA |
| 2335 | YANG-2304 | VH domain | QVQLVQSGTEVKKPGASVKVSCKVSGYTLPELAIHWVRQAPGKG |
| | | amino | LEWMGTFDPEDGETICAQKFQGRVTMTEDTSTDTAYMDLSSLRS |
| | | acid | EDTAVYYCATTSIIAARWWFDPWGQGTLVTVSS |
| | | sequence | |
| 2336 | YANG-2304 | HCDR1 | GYTLPELA |
| 2337 | YANG-2304 | HCDR2 | FDPEDGET |
| 2338 | YANG-2304 | HCDR3 | ATTSIIAARWWFDP |
| 2339 | YANG-2304 | VL domain | CAATCTGCCCTGACTCAGCCTCCCTCCGCGTCCGGGTCTCCTGG |
| | | nucleic | ACAGTCAGTCACCATCTCCTGCACTGGAACCAGCAGTGACGTTG |
| | | acid | GTGGTTATGACTATGTCTCCTGGTACCAACAACACCCAGGCAAA |
| | | sequence | GCCCCCAAACTCATGATTTATGAGGTCAGTAAGCGGCCCTCAGG |
| | | | GGTCCCTGATCGCTTCTCTGGCTCCAAGTCTGGCAACACGGCCT |
| | | | CCCTGACCGTCTCTGGGCTCCAGGCTGAGGATGAGGCTGATTAT |
| | | | TACTGCAGTTCATTTGCAGGCAGCAACAATGTGGTTTTCGGCGG |
| | | | AGGGGCCAAGCTGACCGTCCTG |
| 2340 | YANG-2304 | VL domain | QSALTQPPSASGSPGQSVTISCTGTSSDVGGYDYVSWYQQHPGK |
| | | amino | APKLMIYEVSKRPSGVPDRFSGSKSGNTASLTVSGLQAEDEADY |
| | | acid | YCSSFAGSNNVVFGGGAKLTVL |
| | | sequence | |
| 2341 | YANG-2304 | LCDR1 | SSDVGGYDY |
| 2342 | YANG-2304 | LCDR2 | EVS |
| 2343 | YANG-2304 | LCDR3 | SSFAGSNNVV |
| 2344 | YANG-2305 | VH domain | CAGGTGCAGCTGGTGGAGTCTGGGGGAGGCGTGGTCCAGCCTGG |
| | | nucleic | GAGGTCCCTGAGACTCTCCTGTGCAGCGTCTGGATTCACCTTCA |
| | | acid | GTAGTTATGGCATGCACTGGGTCCGCCAGGCTCCAGGCAAGGGG |
| | | sequence | CTGGAGTGGGTGGCAATTATTTGGTATGATGGAAGTAAGAAATA |
| | | | CTATGCAGACTCCGTGAAGGGCCGATTCACCATCTCCAGAGACA |
| | | | ATTCCAAGAACACGCTGAATCTGCAAATGAACAGCCTGAGAGCC |
| | | | GAGGACACGGCTGTGTATTACTGTGCGAGAGAAGAGGATATAGT |
| | | | GGCTTCGGGGGGGCTCTATTACAACTTCAACGGTATGGACGTCT |
| | | | GGGGCCAAGGGACCACGGTCACCGTTTCCTCA |
| 2345 | YANG-2305 | VH domain | QVQLVESGGGVVQPGRSLRLSCAASGFTFSSYGMHWVRQAPGKG |
| | | amino | LEWVAIIWYDGSKKYYADSVKGRFTISRDNSKNTLNLQMNSLRA |
| | | acid | EDTAVYYCAREEDIVASGGLYYNFNGMDVWGQGTTVTVSS |
| | | sequence | |
| 2346 | YANG-2305 | HCDR1 | GFTFSSYG |
| 2347 | YANG-2305 | HCDR2 | IWYDGSKK |
| 2348 | YANG-2305 | HCDR3 | AREEDIVASGGLYYNFNGMDV |
| 2349 | YANG-2305 | VL domain | TCCTATGAGCTGACTCAGCCACCCTCAGTGTCCGTGTCCCCAGG |
| | | nucleic | ACAGACAGCCAGCATCACCTGCTCTGGAGATAAATTGGGGGATA |
| | | acid | AATATGCTTGCTGGTATCAGCAGAAGCCAGGCCAGTCCCCTGTG |
| | | sequence | CTGGTCATCTATCAAGATAGCAAGCGGCCCTCAGGGATCCCTGA |
| | | | GCGATTCTCTGGCTCCAACTCTGGGAACACAGCCACTCTGACCA |
| | | | TCAACGGGACCCAGGCTATGGATGAGGCTGACTATTTCTGTCAG |
| | | | GCGTGGGACAGCACCACTGTGGTATTCGGCGGAGGGACCAAGCT |
| | | | GACCGTCCTA |
| 2350 | YANG-2305 | VL domain | SYELTQPPSVSVSPGQTASITCSGDKLGDKYACWYQQKPGQSPV |
| | | amino | LVIYQDSKRPSGIPERFSGSNSGNTATLTINGTQAMDEADYFCQ |
| | | acid | AWDSTTVVFGGGTKLTVL |
| | | sequence | |
| 2351 | YANG-2305 | LCDR1 | KLGDKY |
| 2352 | YANG-2305 | LCDR2 | QDS |
| 2353 | YANG-2305 | LCDR3 | QAWDSTTVV |
| 2354 | YANG-2306 | VH domain | CAGGTCCAGCTGGTACAATCTGGGGCTGAGGTGAAGAAGCCTGG |
| | | nucleic | GGCCTCAGTGAAGGTCTCCTGCAAGGTTTCCGGATACACCCTCC |
| | | acid | CTGAAATATCCATACACTGGGTGCGACAGGCTCCTGGAAAAGGG |
| | | sequence | CTTGAGTGGATGGGAGGTTTTGATCCTGAAGATGGTGAAACAAT |
| | | | CTACGCACAGAAGTTCCAGGGCAGAGTGATCATGACCGAGGACA |
| | | | CATCTACAGACACAGCCTATATGGACCTGAGCAGCCTGAGATCT |
| | | | GAGGACACGGCCGTGTATTTCTGTGCAGCTGCCCCGGCTATAGC |
| | | | TTCAGCTTCAACCTTCTGGCTCGACCCCTGGGGCCAGGGAACCC |
| | | | TGGTCACCGTCTCCACA |
| 2355 | YANG-2306 | VH domain | QVQLVQSGAEVKKPGASVKVSCKVSGYTLPEISIHWVRQAPGKG |
| | | amino | LEWMGGFDPEDGETIYAQKFQGRVIMTEDTSTDTAYMDLSSLRS |
| | | acid | EDTAVYFCAAAPAIASASTFWLDPWGQGTLVTVST |
| | | sequence | |
| 2356 | YANG-2306 | HCDR1 | GYTLPEIS |
| 2357 | YANG-2306 | HCDR2 | FDPEDGET |
| 2358 | YANG-2306 | HCDR3 | AAAPAIASASTFWLDP |
| 2359 | YANG-2306 | VL domain | CAGTCTGCCCTGACTCAGCCTCCCTCCGCGTCCGGGTCTCCTGG |
| | | nucleic | ACAGTCAGTCACCATCTCCTGCACTGGAACCAGCAGTGACGTTG |
| | | acid | GTGGTTATAACTATGTCTCCTGGTACCAACAGCACCCAGGCAAA |
| | | sequence | GCCCCCAAACTCATGATTTATGAGGTCACTAAGCGGCCCTCAGG |
| | | | GGTCCCTGATCGCTTCTCTGGCTCCAAGTCTGACAACACGGCCT |
| | | | CCCTGACCGTCTCTGGGCTCCAGGCTGAGGATGAGGCTGATTAT |
| | | | TACTGCAGTTCATATGCAGGCAGCAACAATTTGGTATTCGGCGG |
| | | | AGGGACCAAGCTGACCGTCCTA |
| 2360 | YANG-2306 | VL domain | QSALTQPPSASGSPGQSVTISCTGTSSDVGGYNYVSWYQQHPGK |
| | | amino | APKLMIYEVTKRPSGVPDRFSGSKSDNTASLTVSGLQAEDEADY |
| | | acid | YCSSYAGSNNLVFGGGTKLTVL |
| | | sequence | |
| 2361 | YANG-2306 | LCDR1 | SSDVGGYNY |
| 2362 | YANG-2306 | LCDR2 | EVT |
| 2363 | YANG-2306 | LCDR3 | SSYAGSNNLV |

TABLE 2
constant region sequences

| | | | | |
|---|---|---|---|---|
| 417 | Human IgG1 | IGHG1*01 | Human Heavy | gcctccaccaagggcccatcggtcttccccctggcaccctcctccaagagcacctctggg |
| | constant | | Chain | ggcacagcggccctgggctgcctggtcaaggactacttccccgaaccggtgacggtgtcg |
| | region | | Constant Region | tggaactcaggcgccctgaccagcggcgtgcacaccttcccggctgtcctacagtcctca |
| | | | (IGHG1*01) | ggactctactccctcagcagcgtggtgaccgtgccctccagcagcttgggcacccagacc |
| | | | Nucleotide | tacatctgcaacgtgaatcacaagcccagcaacaccaaggtggacaagaaagttgagccc |
| | | | Sequence | aaatcttgtgacaaaactcacacatgcccaccgtgcccagcacctgaactcctgggggga |
| | | | | ccgtcagtcttcctcttccccccaaaacccaaggacaccctcatgatctcccggacccct |
| | | | | gaggtcacatgcgtggtggtggacgtgagccacgaagaccctgaggtcaagttcaactgg |
| | | | | tacgtggacggcgtggaggtgcataatgccaagacaaagccgcgggaggagcagtacaac |
| | | | | agcacgtaccgggtggtcagcgtcctcaccgtcctgcaccaggactggctgaatggcaag |
| | | | | gagtacaagtgcaaggtctccaacaaagccctcccagcccccatcgagaaaaccatctcc |
| | | | | aaagccaaagggcagccccgagaaccacaggtgtacaccctgcccccatcccgggatgag |
| | | | | ctgaccaagaaccaggtcagcctgacctgcctggtcaaaggcttctatcccagcgacatc |
| | | | | gccgtggagtgggagagcaatgggcagccggagaacaactacaagaccacgcctcccgtg |
| | | | | ctggactccgacggctccttcttcctctacagcaagctcaccgtggacaagagcaggtgg |
| | | | | cagcaggggaacgtcttctcatgctccgtgatgcatgaggctctgcacaaccactacacg |
| | | | | cagaagagcctctccctgtctccgggtaaa |
| 418 | | | Human Heavy | ASTKGPSVFPLAPSSKSTSGGTAALGCLVKDYFPEPVTVSWNSGALTSGVHTFPAVLQSS |
| | | | Chain | GLYSLSSVVTVPSSSLGTQTYICNVNHKPSNTKVDKKVEPKSCDKTHTCPPCPAPELLGG |
| | | | Constant Region | PSVFLFPPKPKDTLMISRTPEVTCVVVDVSHEDPEVKFNWYVDGVEVHNAKTKPREEQYN |
| | | | (IGHG1*01) | STYRVVSVLTVLHQDWLNGKEYKCKVSNKALPAPIEKTISKAKGQPREPQVYTLPPSRDE |
| | | | Protein | LTKNQVSLTCLVKGFYPSDIAVEWESNGQPENNYKTTPPVLDSDGSFFLYSKLTVDKSRW |
| | | | Sequence | QQGNVFSCSVMHEALHNHYTQKSLSLSPGK |
| | | | (P01857) | |
| 419 | Human IgG1 | IGHG1*02 | Human Heavy | gcctccaccaagggcccatcggtcttccccctggcaccctcctccaagagcacctctggg |
| | constant | or | Chain | ggcacagcggccctgggctgcctggtcaaggactacttccccgaaccggtgacggtgtcg |
| | region | IGHG1*05 | Constant Region | tggaactcaggcgccctgaccagcggcgtgcacaccttcccggctgtcctacagtcctca |
| | | | (IGHG1*02 | ggactctactccctcagcagcgtggtgaccgtgccctccagcagcttgggcacccagacc |
| | | | or IGHG1*05) | tacatctgcaacgtgaatcacaagcccagcaacaccaaggtggacaagaaagttgagccc |
| | | | Nucleotide | aaatcttgtgacaaaactcacacatgcccaccgtgcccagcacctgaactcctgggggga |
| | | | Sequence | ccgtcagtcttcctcttccccccaaaacccaaggacaccctcatgatctcccggacccct |
| | | | | gaggtcacatgcgtggtggtggacgtgagccacgaagaccctgaggtcaagttcaactgg |
| | | | | tacgtggacggcgtggaggtgcataatgccaagacaaagccgcgggaggagcagtacaac |
| | | | | agcacgtaccgtgtggtcagcgtcctcaccgtcctgcaccaggactggctgaatggcaag |
| | | | | gagtacaagtgcaaggtctccaacaaagccctcccagcccccatcgagaaaaccatctcc |
| | | | | aaagccaaagggcagccccgagaaccacaggtgtacaccctgcccccatcccgggatgag |
| | | | | ctgaccaagaaccaggtcagcctgacctgcctggtcaaaggcttctatcccagcgacatc |
| | | | | gccgtggagtgggagagcaatgggcagccggagaacaactacaagaccacgcctcccgtg |
| | | | | ctggactccgacggctccttcttcctctacagcaagctcaccgtggacaagagcaggtgg |
| | | | | cagcaggggaacgtcttctcatgctccgtgatgcatgaggctctgcacaaccactacacg |
| | | | | cagaagagcctctccctgtctccgggtaaa |
| 420 | | | Human Heavy Chain | A S T K G P S V F P L A P S S K S T S G G T A A L G C L V K |
| | | | Constant Region | D Y F P E P V T V S W N S G A L T S G V H T F P A V L Q S S |
| | | | (IGHG1*02) | G L Y S L S S V V T V P S S S L G T Q T Y I C N V N H K P S |
| | | | Protein | N T K V D K K V E P K S C D K T H T C P P C P A P E L L G G |
| | | | Sequence | P S V F L F P P K P K D T L M I S R T P E V T C V V V D V S |
| | | | | H E D P E V K F N W Y V D G V E V H N A K T K P R E E Q Y N |
| | | | | S T Y R V V S V L T V L H Q D W L N G K E Y K C K V S N K A |
| | | | | L P A P I E K T I S K A K G Q P R E P Q V Y T L P P S R D E |
| | | | | L T K N Q V S L T C L V K G F Y P S D I A V E W E S N G Q P |
| | | | | E N N Y K T T P P V L D S D G S F F L Y S K L T V D K S R W |
| | | | | Q Q G N V F C S S V M H E A L H N H Y T Q K S L S L S P G K |
| 421 | Human IgG1 | IGHG1*03 | Human Heavy Chain | gcctccaccaagggcccatcggtcttccccctggcaccctcctccaagagcacctctggg |
| | constant | | Constant Region | ggcacagcggccctgggctgcctggtcaaggactacttccccgaaccggtgacggtgtcg |
| | region | | (IGHG1*03) | tggaactcaggcgccctgaccagcggcgtgcacaccttcccggctgtcctacagtcctca |
| | | | Nucleotide | ggactctactccctcagcagcgtggtgaccgtgccctccagcagcttgggcacccagacc |
| | | | Sequence (Y14737) | tacatctgcaacgtgaatcacaagcccagcaacaccaaggtggacaagagagttgagccc |
| | | | | aaatcttgtgacaaaactcacacatgcccaccgtgcccagcacctgaactcctgggggga |
| | | | | ccgtcagtcttcctcttccccccaaaacccaaggacaccctcatgatctcccggacccct |
| | | | | gaggtcacatgcgtggtggtggacgtgagccacgaagaccctgaggtcaagttcaactgg |
| | | | | tacgtggacggcgtggaggtgcataatgccaagacaaagccgcgggaggagcagtacaac |
| | | | | agcacgtaccgtgtggtcagcgtcctcaccgtcctgcaccaggactggctgaatggcaag |
| | | | | gagtacaagtgcaaggtctccaacaaagccctcccagcccccatcgagaaaaccatctcc |
| | | | | aaagccaaagggcagccccgagaaccacaggtgtacaccctgcccccatcccgggaggag |
| | | | | atgaccaagaaccaggtcagcctgacctgcctggtcaaaggcttctatcccagcgacatc |
| | | | | gccgtggagtgggagagcaatgggcagccggagaacaactacaagaccacgcctcccgtg |
| | | | | ctggactccgacggctccttcttcctctatagcaagctcaccgtggacaagagcaggtgg |
| | | | | cagcaggggaacgtcttctcatgctccgtgatgcatgaggctctgcacaaccactacacg |
| | | | | cagaagagcctctccctgtccccgggtaaa |
| 422 | | | Human Heavy Chain | A S T K G P S V F P L A P S S K S T S G G T A A L G C L V K |
| | | | Constant Region | D Y F P E P V T V S W N S G A L T S G V H T F P A V L Q S S |
| | | | (IGHG1*03) | G L Y S L S S V V T V P S S S L G T Q T Y I C N V N H K P S |
| | | | Protein | N T K V D K R V E P K S C D K T H T C P P C P A P E L L G G |
| | | | Sequence | P S V F L F P P K P K D T L M I S R T P E V T C V V V D V S |
| | | | | H E D P E V K F N W Y V D G V E V H N A K T K P R E E Q Y N |
| | | | | S T Y R V V S V L T V L H Q D W L N G K E Y K C K V S N K A |
| | | | | L P A P I E K T I S K A K G Q P R E P Q V Y T L P P S R E E |
| | | | | M T K N Q V S L T C L V K G F Y P S D I A V E W E S N G Q P |
| | | | | E N N Y K T T P P V L D S D G S F F L Y S K L T V D K S R W |
| | | | | Q Q G N V F S C S V M H E A L H N H Y T Q K S L S L S P G K |
| 423 | Human IgG1 | IGHG1*04 | Human Heavy Chain | gcctccaccaagggcccatcggtcttccccctggcaccctcctccaagagcacctctggg |
| | constant | | Constant Region | ggcacagcggccctgggctgcctggtcaaggactacttccccgaaccggtgacggtgtcg |
| | region | | (IGHG1*04) | tggaactcaggcgccctgaccagcggcgtgcacaccttcccggctgtcctacagtcctca |
| | | | Nucleotide | ggactctactccctcagcagcgtggtgaccgtgccctccagcagcttgggcacccagacc |
| | | | Sequence | tacatctgcaacgtgaatcacaagcccagcaacaccaaggtggacaagaaagttgagccc |
| | | | | aaatcttgtgacaaaactcacacatgcccaccgtgcccagcacctgaactcctgggggga |
| | | | | ccgtcagtcttcctcttccccccaaaacccaaggacaccctcatgatctcccggacccct |
| | | | | gaggtcacatgcgtggtggtggacgtgagccacgaagaccctgaggtcaagttcaactgg |
| | | | | tacgtggacggcgtggaggtgcataatgccaagacaaagccgcgggaggagcagtacaac |
| | | | | agcacgtaccgtgtggtcagcgtcctcaccgtcctgcaccaggactggctgaatggcaag |
| | | | | gagtacaagtgcaaggtctccaacaaagccctcccagcccccatcgagaaaaccatctcc |
| | | | | aaagccaaagggcagccccgagaaccacaggtgtacaccctgcccccatcccgggatgag |
| | | | | ctgaccaagaaccaggtcagcctgacctgcctggtcaaaggcttctatcccagcgacatc |
| | | | | gccgtggagtgggagagcaatgggcagccggagaacaactacaagaccacgcctcccgtg |
| | | | | ctggactccgacggctccttcttcctctacagcaagctcaccgtggacaagagcaggtgg |
| | | | | cagcaggggaacatcttctcatgctccgtgatgcatgaggctctgcacaaccactacacg |
| | | | | cagaagagcctctccctgtctccgggtaaa |
| 424 | | | Human Heavy Chain | ASTKGPSVFPLAPSSKSTSGGTAALGCLVKDYFPEPVTVSWNSGALTSGVHTFPAVLQSS |
| | | | Constant Region | GLYSLSSVVTVPSSSLGTQTYICNVNHKPSNTKVDKKVEPKSCDKTHTCPPCPAPELLGG |
| | | | (IGHG1*04) | PSVFLFPPKPKDTLMISRTPEVTCVVVDVSHEDPEVKFNWYVDGVEVHNAKTKPREEQYN |
| | | | Protein | STYRVVSVLTVLHQDWLNGKEYKCKVSNKALPAPIEKTISKAKGQPREPQVYTLPPSRDE |
| | | | Sequence | LTKNQVSLTCLVKGFYPSDIAVEWESNGQPENNYKTTPPVLDSDGSFFLYSKLTVDKSRW |
| | | | | QQGNIFSCSVMHEALHNHYTQKSLSLSPGK |
| 425 | Disabled | Disabled | Disabled Human | gcctccaccaagggcccatcggtcttccccctggcaccctcctccaagagcacctctggg |
| | Human IgG1 | human | IGHG1*01 | ggcacagcggccctgggctgcctggtcaaggactacttccccgaaccggtgacggtgtcg |
| | heavy chain | IGHG1*01 | Heavy Chain | tggaactcaggcgccctgaccagcggcgtgcacaccttcccggctgtcctacagtcctca |
| | constant | | Constant | ggactctactccctcagcagcgtggtgaccgtgccctccagcagcttgggcacccagacc |
| | region | | Region | tacatctgcaacgtgaatcacaagcccagcaacaccaaggtggacaagaaagtggagccc |
| | | | Nucleotide | aaatcttgtgacaaaactcacacatgcccaccgtgcccagcacctgaactcgcgggggca |
| | | | Sequence. | ccgtcagtcttcctcttccccccaaaacccaaggacaccctcatgatctcccggacccct |
| | | | | gaggtcacatgcgtggtggtggacgtgagccacgaagaccctgaggtcaagttcaactgg |
| | | | | tacgtggacggcgtggaggtgcataatgccaagacaaagccgcgggaggagcagtacaac |
| | | | | agcacgtaccgtgtggtcagcgtcctcaccgtcctgcaccaggactggctgaatggcaag |
| | | | | gagtacaagtgcaaggtctccaacaaagccctcccagcccccatcgagaaaaccatctcc |
| | | | | aaagccaaagggcagccccgagaaccacaggtgtacaccctgcccccatcccgggatgag |
| | | | | ctgaccaagaaccaggtcagcctgacctgcctggtcaaaggcttctatcccagcgacatc |
| | | | | gccgtggagtgggagagcaatgggcagccggagaacaactacaagaccacgcctcccgtg |
| | | | | ctggactccgacggctccttcttcctctacagcaagctcaccgtggacaagagcaggtgg |
| | | | | cagcaggggaacgtcttctcatgctccgtgatgcatgaggctctgcacaaccactacacg |
| | | | | cagaagagcctctccctgtctccgggtaaa |
| 426 | | | Disabled Human | ASTKGPSVFPLAPSSKSTSGGTAALGCLVKDYFPEPVTVSWNSGALTSGVHTFPAVLQSS |
| | | | IGHG1*01 | GLYSLSSVVTVPSSSLGTQTYICNVNHKPSNTKVDKKVEPKSCDKTHTCPPCPAPELAGA |
| | | | Heavy Chain | PSVFLFPPKPKDTLMISRTPEVTCVVVDVSHEDPEVKFNWYVDGVEVHNAKTKPREEQYN |
| | | | Constant | STYRVVSVLTVLHQDWLNGKEYKCKVSNKALPAPIEKTISKAKGQPREPQVYTLPPSRDE |
| | | | Region Amino | LTKNQVSLTCLVKGFYPSDIAVEWESNGQPENNYKTTPPVLDSDGSFFLYSKLTVDKSRW |
| | | | Acid Sequence. | QQGNVFSCSVMHEALHNHYTQKSLSLSPGK |
| | | | Two residues | |
| | | | that differ | |
| | | | from the wild- | |
| | | | type sequence are | |
| | | | identified in bold. | |
| 427 | Human IgG2 | IGHG2*01 | Human Heavy Chain | gcctccaccaagggcccatcggtcttccccctggcgccctgctccaggagcacctccgag |
| | constant | or | Constant Region | agcacagccgccctgggctgcctggtcaaggactacttccccgaaccggtgacggtgtcg |
| | region | IGHG2*04 | (IGHG2*01or | tggaactcaggcgctctgaccagcggcgtgcacaccttcccagctgtcctacagtcctca |
| | | or | IGHG2*03 or | ggactctactccctcagcagcgtggtgaccgtgccctccagcaacttcggcacccagacc |
| | | IGHG2*05 | IGHG2*05) | tacacctgcaacgtagatcacaagcccagcaacaccaaggtggacaagacagttgagcgc |
| | | | Nucleotide | aaatgttgtgtcgagtgcccaccgtgcccagcaccacctgtggcaggaccgtcagtcttc |
| | | | Sequence | ctcttccccccaaaacccaaggacaccctcatgatctcccggacccctgaggtcacgtgc |
| | | | | gtggtggtggacgtgagccacgaagaccccgaggtccagttcaactggtacgtggacggc |
| | | | | gtggaggtgcataatgccaagacaaagccacgggaggagcagttcaacagcacgttccgt |
| | | | | gtggtcagcgtcctcaccgttgtgcaccaggactggctgaacggcaaggagtacaagtgc |
| | | | | aaggtctccaacaaaggcctcccagcccccatcgagaaaaccatctccaaaaccaaaggg |
| | | | | cagccccgagaaccacaggtgtacaccctgcccccatcccgggaggagatgaccaagaac |
| | | | | caggtcagcctgacctgcctggtcaaaggcttctaccccagcgacatcgccgtggagtgg |
| | | | | gagagcaatgggcagccggagaacaactacaagaccacacctcccatgctggactccgac |
| | | | | ggctccttcttcctctacagcaagctcaccgtggacaagagcaggtggcagcaggggaac |
| | | | | gtcttctcatgctccgtgatgcatgaggctctgcacaaccactacacgcagaagagcctc |
| | | | | tccctgtctccgggtaaa |
| 428 | | | Human Heavy Chain | ASTKGPSVFPLAPCSRSTSESTAALGCLVKDYFPEPVTVSWNSGALTSGVHTFPAVLQSS |
| | | | Constant Region | GLYSLSSVVTVPSSNFGTQTYTCNVDHKPSNTKVDKTVERKCCVECPPCPAPPVAGPSVF |
| | | | (IGHG2*01) | LFPPKPKDTLMISRTPEVTCVVVDVSHEDPEVQFNWYVDGVEVHNAKTKPREEQENSTER |
| | | | Protein | VVSVLTVVHQDWLNGKEYKCKVSNKGLPAPIEKTISKTKGQPREPQVYTLPPSREEMTKN |
| | | | Sequence | QVSLTCLVKGFYPSDIAVEWESNGQPENNYKTTPPMLDSDGSFFLYSKLTVDKSRWQQGN |
| | | | | VFSCSVMHEALHNHYTQKSLSLSPGK |
| 429 | Human IgG2 | IGHG2*02 | Human Heavy Chain | GCCTCCACCAAGGGCCCATCGGTCTTCCCCCTGGCGCCCTGCTCCAGGAGCACCTCCGAG |
| | constant | | Constant Region | AGCACAGCGGCCCTGGGCTGCCTGGTCAAGGACTACTTCCCCGAACCGGTGACGGTGTCG |
| | region | | (IGHG2*02) | TGGAACTCAGGCGCTCTGACCAGCGGCGTGCACACCTTCCCGGCTGTCCTACAGTCCTCA |
| | | | Nucleotide | GGACTCTACTCCCTCAGCAGCGTGGTGACCGTGACCTCCAGCAACTTCGGCACCCAGACC |
| | | | Sequence | TACACCTGCAACGTAGATCACAAGCCCAGCAACACCAAGGTGGACAAGACAGTTGAGCGC |
| | | | | AAATGTTGTGTCGAGTGCCCACCGTGCCCAGCACCACCTGTGGCAGGACCGTCAGTCTTC |
| | | | | CTCTTCCCCCCAAAACCCAAGGACACCCTCATGATCTCCCGGACCCCTGAGGTCACGTGC |
| | | | | GTGGTGGTGGACGTGAGCCACGAAGACCCCGAGGTCCAGTTCAACTGGTACGTGGACGGC |
| | | | | ATGGAGGTGCATAATGCCAAGACAAAGCCACGGGAGGAGCAGTTCAACAGCACGTTCCGT |
| | | | | GTGGTCAGCGTCCTCACCGTCGTGCACCAGGACTGGCTGAACGGCAAGGAGTACAAGTGC |
| | | | | AAGGTCTCCAACAAAGGCCTCCCAGCCCCCATCGAGAAAACCATCTCCAAAACCAAAGGG |
| | | | | CAGCCCCGAGAACCACAGGTGTACACCCTGCCCCCATCCCGGGAGGAGATGACCAAGAAC |
| | | | | CAGGTCAGCCTGACCTGCCTGGTCAAAGGCTTCTACCCCAGCGACATCGCCGTGGAGTGG |
| | | | | GAGAGCAATGGGCAGCCGGAGAACAACTACAAGACCACACCTCCCATGCTGGACTCCGAC |
| | | | | GGCTCCTTCTTCCTCTACAGCAAGCTCACCGTGGACAAGAGCAGGTGGCAGCAGGGGAAC |
| | | | | GTCTTCTCATGCTCCGTGATGCATGAGGCTCTGCACAACCACTACACACAGAAGAGCCTC |
| | | | | TCCCTGTCTCCGGGTAAA |
| 430 | | | Human Heavy Chain | ASTKGPSVFPLAPCSRSTSESTAALGCLVKDYFPEPVTVSWNSGALTSGVHTFPAVLOSS |
| | | | Constant Region | GLYSLSSVVTVTSSNFGTQTYTCNVDHKPSNTKVDKTVERKCCVECPPCPAPPVAGPSVF |
| | | | (IGHG2*02) | LFPPKPKDTLMISRTPEVTCVVVDVSHEDPEVQFNWYVDGMEVHNAKTKPREEQFNSTER |
| | | | Protein | VVSVLTVVHQDWLNGKEYKCKVSNKGLPAPIEKTISKTKGQPREPQVYTLPPSREEMTKN |
| | | | Sequence | QVSLTCLVKGFYPSDIAVEWESNGQPENNYKTTPPMLDSDGSFFLYSKLTVDKSRWQQGN |
| | | | | VFSCSVMHEALHNHYTQKSLSLSPGK |
| 431 | Human IgG2 | IGHG2*04 | Human Heavy Chain | gcctccaccaagggcccatcggtcttccccctggcgccctgctccaggagcacctccgag |
| | constant | | Constant Region | agcacagcggccctgggctgcctggtcaaggactacttccccgaaccggtgacggtgtcg |
| | region | | (IGHG2*04) | tggaactcaggcgctctgaccagcggcgtgcacaccttcccagctgtcctacagtcctca |
| | | | Nucleotide | ggactctactccctcagcagcgtggtgaccgtgccctccagcagcttgggcacccagacc |
| | | | Sequence | tacacctgcaacgtagatcacaagcccagcaacaccaaggtggacaagacagttgagcgc |
| | | | | aaatgttgtgtcgagtgcccaccgtgcccagcaccacctgtggcaggaccgtcagtcttc |
| | | | | ctcttccccccaaaacccaaggacaccctcatgatctcccggacccctgaggtcacgtgc |
| | | | | gtggtggtggacgtgagccacgaagaccccgaggtccagttcaactggtacgtggacggc |
| | | | | gtggaggtgcataatgccaagacaaagccacgggaggagcagttcaacagcacgttccgt |
| | | | | gtggtcagcgtcctcaccgttgtgcaccaggactggctgaacggcaaggagtacaagtgc |
| | | | | aaggtctccaacaaaggcctcccagcccccatcgagaaaaccatctccaaaaccaaaggg |
| | | | | cagccccgagaaccacaggtgtacaccctgcccccatcccgggaggagatgaccaagaac |
| | | | | caggtcagcctgacctgcctggtcaaaggcttctaccccagcgacatcgccgtggagtgg |
| | | | | gagagcaatgggcagccggagaacaactacaagaccacacctcccatgctggactccgac |
| | | | | ggctccttcttcctctacagcaagctcaccgtggacaagagcaggtggcagcaggggaac |
| | | | | gtcttctcatgctccgtgatgcatgaggctctgcacaaccactacacgcagaagagcctc |
| | | | | tccctgtctccgggtaaa |
| 432 | | | Human Heavy Chain | ASTKGPSVFPLAPCSRSTSESTAALGCLVKDYFPEPVTVSWNSGALTSGVHTFPAVLQSS |
| | | | Constant Region | GLYSLSSVVTVPSSSLGTQTYTCNVDHKPSNTKVDKTVERKCCVECPPCPAPPVAGPSVF |
| | | | (IGHG2*04) | LFPPKPKDTLMISRTPEVTCVVVDVSHEDPEVQFNWYVDGVEVHNAKTKPREEQFNSTER |
| | | | Protein | VVSVLTVVHQDWLNGKEYKCKVSNKGLPAPIEKTISKTKGQPREPQVYTLPPSREEMTKN |
| | | | Sequence | QVSLTCLVKGFYPSDIAVEWESNGQPENNYKTTPPMLDSDGSFFLYSKLTVDKSRWQQGN |
| | | | | VFSCSVMHEALHNHYTQKSLSLSPGK |
| 433 | Human IgG2 | IGHG2*06 | Human Heavy Chain | GCCTCCACCAAGGGCCCATCGGTCTTCCCCCTGGCGCCCTGCTCCAGGAGCACCTCCGAG |
| | constant | | Constant Region | AGCACAGCGGCCCTGGGCTGCCTGGTCAAGGACTACTTCCCCGAACCGGTGACGGTGTCG |
| | region | | (IGHG2*06) | TGGAACTCAGGCGCTCTGACCAGCGGCGTGCACACCTTCCCGGCTGTCCTACAGTCCTCA |
| | | | Nucleotide | GGACTCTACTCCCTCAGCAGCGTGGTGACCGTGCCCTCCAGCAACTTCGGCACCCAGACC |
| | | | Sequence | TACACCTGCAACGTAGATCACAAGCCCAGCAACACCAAGGTGGACAAGACAGTTGAGCGC |
| | | | | AAATGTTGTGTCGAGTGCCCACCGTGCCCAGCACCACCTGTGGCAGGACCGTCAGTCTTC |
| | | | | CTCTTCCCCCCAAAACCCAAGGACACCCTCATGATCTCCCGGACCCCTGAGGTCACGTGC |
| | | | | GTGGTGGTGGACGTGAGCCACGAAGACCCCGAGGTCCAGTTCAACTGGTACGTGGACGGC |
| | | | | GTGGAGGTGCATAATGCCAAGACAAAGCCACGGGAGGAGCAGTTCAACAGCACGTTCCGT |
| | | | | GTGGTCAGCGTCCTCACCGTCGTGCACCAGGACTGGCTGAACGGCAAGGAGTACAAGTGC |
| | | | | AAGGTCTCCAACAAAGGCCTCCCAGCCCCCATCGAGAAAACCATCTCCAAAACCAAAGGG |
| | | | | CAGCCCCGAGAACCACAGGTGTACACCCTGCCCCCATCCCGGGAGGAGATGACCAAGAAC |
| | | | | CAGGTCAGCCTGACCTGCCTGGTCAAAGGCTTCTACCCCAGCGACATCTCCGTGGAGTGG |
| | | | | GAGAGCAATGGGCAGCCGGAGAACAACTACAAGACCACACCTCCCATGCTGGACTCCGAC |
| | | | | GGCTCCTTCTTCCTCTACAGCAAGCTCACCGTGGACAAGAGCAGGTGGCAGCAGGGGAAC |
| | | | | GTCTTCTCATGCTCCGTGATGCATGAGGCTCTGCACAACCACTACACACAGAAGAGCCTC |
| | | | | TCCCTGTCTCCGGGTAAA |
| 434 | | | Human Heavy Chain | ASTKGPSVFPLAPCSRSTSESTAALGCLVKDYFPEPVTVSWNSGALTSGVHTFPAVLQSS |
| | | | Constant Region | GLYSLSSVVTVPSSNFGTQTYTCNVDHKPSNTKVDKTVERKCCVECPPCPAPPVAGPSVF |
| | | | (IGHG2*06) | LFPPKPKDTLMISRTPEVTCVVVDVSHEDPEVQFNWYVDGVEVHNAKTKPREEQFNSTER |
| | | | Protein | VVSVLTVVHQDWLNGKEYKCKVSNKGLPAPIEKTISKTKGQPREPQVYTLPPSREEMTKN |
| | | | Sequence | QVSLTCLVKGFYPSDISVEWESNGQPENNYKTTPPMLDSDGSFFLYSKLTVDKSRWQQGN |
| | | | | VFSCSVMHEALHNHYTQKSLSLSPGK |
| 435 | Human IgG4 | IGHG4*01 | Human Heavy Chain | gcttccaccaagggcccatccgtcttccccctggcgccctgctccaggagcacctccgag |
| | constant | or | Constant Region | agcacagccgccctgggctgcctggtcaaggactacttccccgaaccggtgacggtgtcg |
| | region | IGHG4*04 | (IGHG4*01 or | tggaactcaggcgccctgaccagcggcgtgcacaccttcccggctgtcctacagtcctca |
| | | | IGHG4*04) | ggactctactccctcagcagcgtggtgaccgtgccctccagcagcttgggcacgaagacc |
| | | | Nucleotide | tacacctgcaacgtagatcacaagcccagcaacaccaaggtggacaagagagttgagtcc |
| | | | Sequence | aaatatggtcccccatgcccatcatgcccagcacctgagttcctggggggaccatcagtc |
| | | | | ttcctgttccccccaaaacccaaggacactctcatgatctcccggacccctgaggtcacg |
| | | | | tgcgtggtggtggacgtgagccaggaagaccccgaggtccagttcaactggtacgtggat |
| | | | | ggcgtggaggtgcataatgccaagacaaagccgcgggaggagcagttcaacagcacgtac |
| | | | | cgtgtggtcagcgtcctcaccgtcctgcaccaggactggctgaacggcaaggagtacaag |
| | | | | tgcaaggtctccaacaaaggcctcccgtcctccatcgagaaaaccatctccaaagccaaa |
| | | | | gggcagccccgagagccacaggtgtacaccctgcccccatcccaggaggagatgaccaag |
| | | | | aaccaggtcagcctgacctgcctggtcaaaggcttctaccccagcgacatcgccgtggag |
| | | | | tgggagagcaatgggcagccggagaacaactacaagaccacgcctcccgtgctggactcc |
| | | | | gacggctccttcttcctctacagcaggctaaccgtggacaagagcaggtggcaggagggg |
| | | | | aatgtcttctcatgctccgtgatgcatgaggctctgcacaaccactacacacagaagagc |
| | | | | ctctccctgtctctgggtaaa |
| 436 | | | Human Heavy Chain | ASTKGPSVFPLAPCSRSTSESTAALGCLVKDYFPEPVTVSWNSGALTSGVHTFPAVLOSS |
| | | | Constant Region | GLYSLSSVVTVPSSSLGTKTYTCNVDHKPSNTKVDKRVESKYGPPCPSCPAPEFLGGPSV |
| | | | (IGHG4*01) | FLFPPKPKDTLMISRTPEVTCVVVDVSQEDPEVQFNWYVDGVEVHNAKTKPREEQFNSTY |
| | | | Protein | RVVSVLTVLHQDWLNGKEYKCKVSNKGLPSSIEKTISKAKGQPREPQVYTLPPSQEEMTK |
| | | | Sequence (P01861) | NQVSLTCLVKGFYPSDIAVEWESNGQPENNYKTTPPVLDSDGSFFLYSRLTVDKSRWQEG |
| | | | | NVFSCSVMHEALHNHYTQKSLSLSLGK |
| 437 | Human IgG4 | IGHG4*02 | Human Heavy Chain | gcttccaccaagggcccatccgtcttccccctggcgccctgctccaggagcacctccgag |
| | constant | | Constant Region | agcacagccgccctgggctgcctggtcaaggactacttccccgaaccggtgacggtgtcg |
| | region | | (IGHG4*02) | tggaactcaggcgccctgaccagcggcgtgcacaccttcccggctgtcctacagtcctca |
| | | | Nucleotide | ggactctactccctcagcagcgtggtgaccgtgccctccagcagcttgggcacgaagacc |
| | | | Sequence | tacacctgcaacgtagatcacaagcccagcaacaccaaggtggacaagagagttgagtcc |
| | | | | aaatatggtcccccgtgcccatcatgcccagcacctgagttcctggggggaccatcagtc |
| | | | | ttcctgttccccccaaaacccaaggacactctcatgatctcccggacccctgaggtcacg |
| | | | | tgcgtggtggtggacgtgagccaggaagaccccgaggtccagttcaactggtacgtggat |
| | | | | ggcgtggaggtgcataatgccaagacaaagccgcgggaggagcagttcaacagcacgtac |
| | | | | cgtgtggtcagcgtcctcaccgtcgtgcaccaggactggctgaacggcaaggagtacaag |
| | | | | tgcaaggtctccaacaaaggcctcccgtcctccatcgagaaaaccatctccaaagccaaa |
| | | | | gggcagccccgagagccacaggtgtacaccctgcccccatcccaggaggagatgaccaag |
| | | | | aaccaggtcagcctgacctgcctggtcaaaggcttctaccccagcgacatcgccgtggag |
| | | | | tgggagagcaatgggcagccggagaacaactacaagaccacgcctcccgtgctggactcc |
| | | | | gacggctccttcttcctctacagcaggctaaccgtggacaagagcaggtggcaggagggg |
| | | | | aatgtcttctcatgctccgtgatgcatgaggctctgcacaaccactacacgcagaagagc |
| | | | | ctctccctgtctctgggtaaa |
| 438 | | | Human Heavy Chain | ASTKGPSVFPLAPCSRSTSESTAALGCLVKDYFPEPVTVSWNSGALTSGVHTFPAVLQSS |
| | | | Constant Region | GLYSLSSVVTVPSSSLGTKTYTCNVDHKPSNTKVDKRVESKYGPPCPSCPAPEFLGGPSV |
| | | | (IGHG4*02) | FLFPPKPKDTLMISRTPEVTCVVVDVSQEDPEVQFNWYVDGVEVHNAKTKPREEQFNSTY |
| | | | Protein | RVVSVLTVVHQDWLNGKEYKCKVSNKGLPSSIEKTISKAKGQPREPQVYTLPPSQEEMTK |
| | | | Sequence | NQVSLTCLVKGFYPSDIAVEWESNGQPENNYKTTPPVLDSDGSFFLYSRLTVDKSRWQEG |
| | | | | NVFSCSVMHEALHNHYTQKSLSLSLGK |
| 439 | Human IgG4 | IGHG4*03 | Human Heavy Chain | gcttccaccaagggcccatccgtcttccccctggcgccctgctccaggagcacctccgag |
| | constant | | Constant Region | agcacagccgccctgggctgcctggtcaaggactacttccccgaaccggtgacggtgtcg |
| | region | | (IGHG4*03) | tggaactcaggcgccctgaccagcggcgtgcacaccttcccggctgtcctacagtcctca |
| | | | Nucleotide | ggactctactccctcagcagcgtggtgaccgtgccctccagcagcttgggcacgaagacc |
| | | | Sequence | tacacctgcaacgtagatcacaagcccagcaacaccaaggtggacaagagagttgagtcc |
| | | | | aaatatggtcccccatgcccatcatgcccagcacctgagttcctggggggaccatcagtc |
| | | | | ttcctgttccccccaaaacccaaggacactctcatgatctcccggacccctgaggtcacg |
| | | | | tgcgtggtggtggacgtgagccaggaagaccccgaggtccagttcaactggtacgtggat |
| | | | | ggcgtggaggtgcataatgccaagacaaagccgcgggaggagcagttcaacagcacgtac |
| | | | | cgtgtggtcagcgtcctcaccgtcctgcaccaggactggctgaacggcaaggagtacaag |
| | | | | tgcaaggtctccaacaaaggcctcccgtcctccatcgagaaaaccatctccaaagccaaa |
| | | | | gggcagccccgagagccacaggtgtacaccctgcccccatcccaggaggagatgaccaag |
| | | | | aaccaggtcagcctgacctgcctggtcaaaggcttctaccccagcgacatcgccgtggag |
| | | | | tgggagagcaatgggcagccggagaacaactacaagaccacgcctcccgtgctggactcc |
| | | | | gacggctccttcttcctctacagcaagctcaccgtggacaagagcaggtggcaggagggg |
| | | | | aacgtcttctcatgctccgtgatgcatgaggctctgcacaaccactacacgcagaagagc |
| | | | | ctctccctgtctctgggtaaa |
| 440 | | | Human Heavy Chain | ASTKGPSVFPLAPCSRSTSESTAALGCLVKDYFPEPVTVSWNSGALTSGVHTFPAVLQSS |
| | | | Constant Region | GLYSLSSVVTVPSSSLGTKTYTCNVDHKPSNTKVDKRVESKYGPPCPSCPAPEFLGGPSV |
| | | | (IGHG4*03) | FLFPPKPKDTLMISRTPEVTCVVVDVSQEDPEVQFNWYVDGVEVHNAKTKPREEQFNSTY |
| | | | Protein | RVVSVLTVLHQDWLNGKEYKCKVSNKGLPSSIEKTISKAKGQPREPQVYTLPPSQEEMTK |
| | | | Sequence | NQVSLTCLVKGFYPSDIAVEWESNGQPENNYKTTPPVLDSDGSFFLYSKLTVDKSRWQEG |
| | | | | NVFSCSVMHEALHNHYTQKSLSLSLGK |
| 441 | Human IgG4- | IGHG4- PE | Human Heavy Chain | gcctccaccaagggcccatccgtcttccccctggcgccctgctccaggagcacctccgag |
| | PE constant | | Constant Region | agcacggccgccctgggctgcctggtcaaggactacttccccgaaccagtgacggtgtcg |
| | region | | (IGHG4-PE) | tggaactcaggcgccctgaccagcggcgtgcacaccttcccggctgtcctacagtcctca |
| | | | Nucleotide | ggactctactccctcagcagcgtggtgaccgtgccctccagcagcttgggcacgaagacc |
| | | | Sequence | tacacctgcaacgtagatcacaagcccagcaacaccaaggtggacaagagagttgagtcc |
| | | | Version A | aaatatggtcccccatgcccaccatgcccagcgcctgaatttgaggggggaccatcagtc |
| | | | | ttcctgttccccccaaaacccaaggacactctcatgatctcccggacccctgaggtcacg |
| | | | | tgcgtggtggtggacgtgagccaggaagaccccgaggtccagttcaactggtacgtggat |
| | | | | ggcgtggaggtgcataatgccaagacaaagccgcgggaggagcagttcaacagcacgtac |
| | | | | cgtgtggtcagcgtcctcaccgtcctgcaccaggactggctgaacggcaaggagtacaag |
| | | | | tgcaaggtctccaacaaaggcctcccgtcatcgatcgagaaaaccatctccaaagccaaa |
| | | | | gggcagccccgagagccacaggtgtacaccctgcccccatcccaggaggagatgaccaag |
| | | | | aaccaggtcagcctgacctgcctggtcaaaggcttctaccccagcgacatcgccgtggag |
| | | | | tgggagagcaatgggcagccggagaacaactacaagaccacgcctcccgtgctggactcc |
| | | | | gacggatccttcttcctctacagcaggctaaccgtggacaagagcaggtggcaggagggg |
| | | | | aatgtcttctcatgctccgtgatgcatgaggctctgcacaaccactacacacagaagagc |
| | | | | ctctccctgtctctgggtaaa |
| 442 | | | Human Heavy Chain | gcctccaccaagggacctagcgtgttccctctcgccccctgttccaggtccacaagcgag |
| | | | Constant Region | tccaccgctgccctcggctgtctggtgaaagactactttcccgagcccgtgaccgtctcc |
| | | | (IGHG4-PE) | tggaatagcggagccctgacctccggcgtgcacacatttcccgccgtgctgcagagcagc |
| | | | Nucleotide | ggactgtatagcctgagcagcgtggtgaccgtgcccagctccagcctcggcaccaaaacc |
| | | | Sequence | tacacctgcaacgtggaccacaagccctccaacaccaaggtggacaagcgggtggagagc |
| | | | Version B | aagtacggccccccttgccctccttgtcctgcccctgagttcgagggaggaccctccgtg |
| | | | | ttcctgtttccccccaaacccaaggacaccctgatgatctcccggacacccgaggtgacc |
| | | | | tgtgtggtcgtggacgtcagccaggaggaccccgaggtgcagttcaactggtatgtggac |
| | | | | ggcgtggaggtgcacaatgccaaaaccaagcccagggaggagcagttcaattccacctac |
| | | | | agggtggtgagcgtgctgaccgtcctgcatcaggattggctgaacggcaaggagtacaag |
| | | | | tgcaaggtgtccaacaagggactgcccagctccatcgagaagaccatcagcaaggctaag |
| | | | | ggccagccgagggagccccaggtgtataccctgcctcctagccaggaagagatgaccaag |
| | | | | aaccaagtgtccctgacctgcctggtgaagggattctacccctccgacatcgccgtggag |
| | | | | tgggagagcaatggccagcccgagaacaactacaaaacaacccctcccgtgctcgatagc |
| | | | | gacggcagcttctttctctacagccggctgacagtggacaagagcaggtggcaggagggc |
| | | | | aacgtgttctcctgttccgtgatgcacgaggccctgcacaatcactacacccagaagagc |
| | | | | ctctccctgtccctgggcaag |
| 443 | Human IgG4- | IGHG4- PE | Human Heavy Chain | gccagcaccaagggcccttccgtgttccccctggccccttgcagcaggagcacctccgaa |
| | PE constant | Inacti- | Constant Region | tccacagctgccctgggctgtctggtgaaggactactttcccgagcccgtgaccgtgagc |
| | region | vated | (IGHG4-PE) | tggaacagcggcgctctgacatccggcgtccacacctttcctgccgtcctgcagtcctcc |
| | Inactivated | IGHG4 | Nucleotide | ggcctctactccctgtcctccgtggtgaccgtgcctagctcctccctcggcaccaagacc |
| | Human IgG4 | | Sequence | tacacctgtaacgtggaccacaaaccctccaacaccaaggtggacaaacgggtcgagagc |
| | constant | | Version C | aagtacggccctccctgccctccttgtcctgcccccgagttcgaaggcggacccagcgtg |
| | region | | | ttcctgttccctcctaagcccaaggacaccctcatgatcagccggacacccgaggtgacc |
| | | | | tgcgtggtggtggatgtgagccaggaggaccctgaggtccagttcaactggtatgtggat |
| | | | | ggcgtggaggtgcacaacgccaagacaaagccccgggaagagcagttcaactccacctac |
| | | | | agggtggtcagcgtgctgaccgtgctgcatcaggactggctgaacggcaaggagtacaag |
| | | | | tgcaaggtcagcaataagggactgcccagcagcatcgagaagaccatctccaaggctaaa |
| | | | | ggccagccccgggaacctcaggtgtacaccctgcctcccagccaggaggagatgaccaag |
| | | | | aaccaggtgagcctgacctgcctggtgaagggattctacccttccgacatcgccgtggag |
| | | | | tgggagtccaacggccagcccgagaacaattataagaccacccctcccgtcctcgacagc |
| | | | | gacggatccttctttctgtactccaggctgaccgtggataagtccaggtggcaggaaggc |
| | | | | aacgtgttcagctgctccgtgatgcacgaggccctgcacaatcactacacccagaagtcc |
| | | | | ctgagcctgtccctgggaaag |
| 444 | | | Human Heavy Chain | ASTKGPSVFPLAPCSRSTSESTAALGCLVKDYFPEPVTVSWNSGALTSGVHTFPAVLQSS |
| | | | Constant Region | GLYSLSSVVTVPSSSLGTKTYTCNVDHKPSNTKVDKRVESKYGPPCPPCPAPEFEGGPSV |
| | | | (IGHG4-PE) | FLFPPKPKDTLMISRTPEVTCVVVDVSQEDPEVQFNWYVDGVEVHNAKTKPREEQFNSTY |
| | | | Protein Sequence | RVVSVLTVLHQDWLNGKEYKCKVSNKGLPSSIEKTISKAKGQPREPQVYTLPPSQEEMTK |
| | | | (Amino acid | NQVSLTCLVKGFYPSDIAVEWESNGQPENNYKTTPPVLDSDGSFFLYSRLTVDKSRWQEG |
| | | | substitution | NVFSCSVMHEALHNHYTQKSLSLSLGK |
| | | | shown in BOLD) | |
| 445 | | | Inactivated | gcctccaccaagggcccatccgtcttccccctggcgccctgctccaggagcacctccgag |
| | | | Human Heavy | agcacggccgccctgggctgcctggtcaaggactacttccccgaaccagtgacggtgtcg |
| | | | Chain Constant | tggaactcaggcgccctgaccagcggcgtgcacaccttcccggctgtcctacagtcctca |
| | | | Region (IGHG4) | ggactctactccctcagcagcgtggtgaccgtgccctccagcagcttgggcacgaagacc |
| | | | Nucleotide | tacacctgcaacgtagatcacaagcccagcaacaccaaggtggacaagagagttgagtcc |
| | | | Sequence | aaatatggtcccccatgcccaccatgcccagcgcctccagttgcggggggaccatcagtc |
| | | | | ttcctgttccccccaaaacccaaggacactctcatgatctcccggacccctgaggtcacg |
| | | | | tgcgtggtggtggacgtgagccaggaagaccccgaggtccagttcaactggtacgtggat |
| | | | | ggcgtggaggtgcataatgccaagacaaagccgcgggaggagcagttcaacagcacgtac |
| | | | | cgtgtggtcagcgtcctcaccgtcctgcaccaggactggctgaacggcaaggagtacaag |
| | | | | tgcaaggtctccaacaaaggcctcccgtcatcgatcgagaaaaccatctccaaagccaaa |
| | | | | gggcagccccgagagccacaggtgtacaccctgcccccatcccaggaggagatgaccaag |
| | | | | aaccaggtcagcctgacctgcctggtcaaaggcttctaccccagcgacatcgccgtggag |
| | | | | tgggagagcaatgggcagccggagaacaactacaagaccacgcctcccgtgctggactcc |
| | | | | gacggatccttcttcctctacagcaggctaaccgtggacaagagcaggtggcaggagggg |
| | | | | aatgtcttctcatgctccgtgatgcatgaggctctgcacaaccactacacacagaagagc |
| | | | | ctctccctgtctctgggtaaa |
| 446 | | | Inactivated Human | ASTKGPSVFPLAPCSRSTSESTAALGCLVKDYFPEPVTVSWNSGALTSGVHTFPAVLQSS |
| | | | Heavy Chain | GLYSLSSVVTVPSSSLGTKTYTCNVDHKPSNTKVDKRVESKYGPPCPPCPAPPVAGGPSV |
| | | | Constant Region | FLFPPKPKDTLMISRTPEVTCVVVDVSQEDPEVQFNWYVDGVEVHNAKTKPREEQFNSTY |
| | | | (IGHG4) Protein | RVVSVLTVLHQDWLNGKEYKCKVSNKGLPSSIEKTISKAKGQPREPQVYTLPPSQEEMTK |
| | | | Sequence | NQVSLTCLVKGFYPSDIAVEWESNGQPENNYKTTPPVLDSDGSFFLYSRLTVDKSRWQEG |
| | | | (inactivating | NVFSCSVMHEALHNHYTQKSLSLSLGK |
| | | | mutations from | |
| | | | human IgG4 | |
| | | | shown in bold) | |
| 447 | Human Cκ | IGKC*01 | Human Cκ Light | cgtacggtggccgctccctccgtgttcatcttcccaccttccgacgagcagctgaagtcc |
| | constant | | Chain | ggcaccgcttctgtcgtgtgcctgctgaacaacttctacccccgcgaggccaaggtgcag |
| | region | | Constant Region | tggaaggtggacaacgccctgcagtccggcaactcccaggaatccgtgaccgagcaggac |
| | | | (IGKC*01) | tccaaggacagcacctactccctgtcctccaccctgaccctgtccaaggccgactacgag |
| | | | Nucleotide | aagcacaaggtgtacgcctgcgaagtgacccaccagggcctgtctagccccgtgaccaag |
| | | | Sequence | tctttcaaccggggcgagtgt |
| 448 | | | Cκ Light Chain | RTVAAPSVFIFPPSDEQLKSGTASVVCLLNNFYPREAKVQWKVDNALQSGNSQESVTEQD |
| | | | Constant Region | SKDSTYSLSSTLTLSKADYEKHKVYACEVTHQGLSSPVTKSENRGEC |
| | | | (IGKC*01) Amino | |
| | | | Acid Sequence | |
| 449 | Human Cκ | IGKC*02 | Cκ Light Chain | cgaactgtggctgcaccatctgtcttcatcttcccgccatctgatgagcagttgaaatct |
| | constant | | Constant | ggaactgcctctgttgtgtgcctgctgaataacttctatcccagagaggccaaagtacag |
| | region | | Region (IGKC*02) | tggaaggtggataacgccctccaatcgggtaactcccaggagagtgtcacagagcaggag |
| | | | Nucleotide | agcaaggacagcacctacagcctcagcagcaccctgacgctgagcaaagcagactacgag |
| | | | Sequence | aaacacaaagtctacgccggcgaagtcacccatcagggcctgagctcgcccgtcacaaag |
| | | | | agcttcaacaggggagagtgt |
| 450 | | | Cκ Light Chain | RTVAAPSVFIFPPSDEQLKSGTASVVCLLNNFYPREAKVQWKVDNALQSGNSQESVTEQE |
| | | | Constant Region | SKDSTYSLSSTLTLSKADYEKHKVYAGEVTHQGLSSPVTKSENRGEC |
| | | | (IGKC*02) Amino | |
| | | | Acid Sequence | |
| 451 | Human Cκ | IGKC*03 | Cκ Light | cgaactgtggctgcaccatctgtcttcatcttcccgccatctgatgagcagttgaaatct |
| | constant | | Chain Constant | ggaactgcctctgttgtgtgcctgctgaataacttctatoccagagaggccaaagtacag |
| | region | | Region (IGKC*03) | cggaaggtggataacgccctccaatcgggtaactcccaggagagtgtcacagagcaggag |
| | | | Nucleotide | agcaaggacagcacctacagcctcagcagcaccctgacgctgagcaaagcagactacgag |
| | | | Sequence | aaacacaaagtctacgcctgcgaagtcacccatcagggcctgagctcgcccgtcacaaag |
| | | | | agcttcaacaggggagagtgt |
| 452 | | | Cκ Light Chain | RTVAAPSVFIFPPSDEQLKSGTASVVCLLNNFYPREAKVQRKVDNALQSGNSQESVTEQE |
| | | | Constant | SKDSTYSLSSTLTLSKADYEKHKVYACEVTHQGLSSPVTKSENRGEC |
| | | | Region (IGKC*03) | |
| | | | Amino Acid | |
| | | | Sequence | |
| 453 | Human Cκ | IGKC*04 | Cκ Light Chain | cgaactgtggctgcaccatctgtcttcatcttcccgccatctgatgagcagttgaaatct |
| | constant | | Constant Region | ggaactgcctctgttgtgtgcctgctgaataacttctatoccagagaggccaaagtacag |
| | region | | (IGKC*04) | tggaaggtggataacgccctccaatcgggtaactcccaggagagtgtcacagagcaggac |
| | | | Nucleotide | agcaaggacagcacctacagcctcagcagcaccctgacgctgagcaaagcagactacgag |
| | | | Sequence | aaacacaaactctacgcctgcgaagtcacccatcagggcctgagctcgcccgtcacaaag |
| | | | | agcttcaacaggggagagtgt |
| 454 | | | Cκ Light | RTVAAPSVFIFPPSDEQLKSGTASVVCLLNNFYPREAKVQWKVDNALQSGNSQESVTEQD |
| | | | Chain Constant | SKDSTYSLSSTLTLSKADYEKHKLYACEVTHQGLSSPVTKSENRGEC |
| | | | Region | |
| | | | (IGKC*04) Amino | |
| | | | Acid Sequence | |
| 455 | Human Cκ | IGKC*05 | Cκ Light | cgaactgtggctgcaccatctgtcttcatcttcccgccatctgatgagcagttgaaatct |
| | constant | | Chain Constant | ggaactgcctctgttgtgtgcctgctgaataacttctatcccagagaggccaaagtacag |
| | region | | Region (IGKC*05) | tggaaggtggataacgccctccaatcgggtaactcccaggagagtgtcacagagcaggac |
| | | | Nucleotide | agcaaggacagcacctacagcctcagcaacaccctgacgctgagcaaagcagactacgag |
| | | | Sequence | aaacacaaagtctacgcctgcgaagtcacccatcagggcctgagctcgcccgtcacaaag |
| | | | | agcttcaacaggggagagtgc |
| 456 | | | Cκ Light | RTVAAPSVFIFPPSDEQLKSGTASVVCLLNNFYPREAKVQWKVDNALQSGNSQESVTEQD |
| | | | Chain Constant | SKDSTYSLSNTLTLSKADYEKHKVYACEVTHQGLSSPVTKSENRGEC |
| | | | Region (IGKC*05) | |
| | | | Amino Acid | |
| | | | Sequence | |
| 457 | Human Cλ | IGLC1*01 | Cλ Light Chain | cccaaggccaaccccacggtcactctgttcccgccctcctctgaggagctccaagccaac |
| | constant | | Constant Region | aaggccacactagtgtgtctgatcagtgacttctacccgggagctgtgacagtggcttgg |
| | region | | (IGLC1*01) | aaggcagatggcagccccgtcaaggcgggagtggagacgaccaaaccctccaaacagagc |
| | | | Nucleotide | aacaacaagtacgcggccagcagctacctgagcctgacgcccgagcagtggaagtcccac |
| | | | Sequence | agaagctacagctgccaggtcacgcatgaagggagcaccgtggagaagacagtggcccct |
| | | | (ENST000003903- | acagaatgttca |
| | | | 21.2) | |
| 458 | | | Cλ Light Chain | PKANPTVTLFPPSSEELQANKATLVCLISDFYPGAVTVAWKADGSPVKAGVETTKPSKQS |
| | | | Constant Region | NNKYAASSYLSLTPEQWKSHRSYSCQVTHEGSTVEKTVAPTECS |
| | | | (IGLC1*01) Amino | |
| | | | Acid Sequence | |
| | | | (A0A075B6K8) | |
| 459 | Human Cλ | IGLC1*02 | Cλ Light Chain | ggtcagcccaaggccaaccccactgtcactctgttcccgccctcctctgaggagctccaa |
| | constant | | Constant | gccaacaaggccacactagtgtgtctgatcagtgacttctacccgggagctgtgacagtg |
| | region | | Region (IGLC1*02) | gcctggaaggcagatggcagccccgtcaagggggagtggagaccaccaaaccctccaaa |
| | | | Nucleotide | cagagcaacaacaagtacgcggccagcagctacctgagcctgacgcccgagcagtggaag |
| | | | Sequence | tcccacagaagctacagctgccaggtcacgcatgaagggagcaccgtggagaagacagtg |
| | | | Version A | gcccctacagaatgttca |
| 460 | | | Cλ Light Chain | ggtcagcccaaggccaaccccactgtcactctgttcccgccctcctctgaggagctccaa |
| | | | Constant | gccaacaaggccacactagtgtgtctgatcagtgacttctacccgggagctgtgacagtg |
| | | | Region (IGLC1*02) | gcctggaaggcagatggcagccccgtcaaggcgggagtggagaccaccaaaccctccaaa |
| | | | Nucleotide | cagagcaacaacaagtacgcggccagcagctacctgagcctgacgcccgagcagtggaag |
| | | | Sequence | tcccacagaagctacagctgccaggtcacgcatgaagggagcaccgtggagaagacagtg |
| | | | Version B | gcccctacagaatgttca |
| 461 | Human Cλ | IGLC1*02 | Cλ Light Chain | GQPKANPTVTLFPPSSEELQANKATLVCLISDFYPGAVTVAWKADGSPVKAGVETTKPSK |
| | constant | | Constant | QSNNKYAASSYLSLTPEQWKSHRSYSCQVTHEGSTVEKTVAPTECS |
| | region | | Region (IGLC1*02) | |
| | | | Amino | |
| | | | Acid Sequence | |
| 462 | Human Cλ | IGLC2*01 | Cλ Light Chain | ggccagcctaaggccgctccttctgtgaccctgttccccccatcctccgaggaactgcag |
| | constant | | Constant | gctaacaaggccaccctcgtgtgcctgatcagcgacttctaccctggcgccgtgaccgtg |
| | region | | Region (IGLC2*01) | gcctggaaggctgatagctctcctgtgaaggccggcgtggaaaccaccaccccttccaag |
| | | | Nucleotide | cagtccaacaacaaatacgccgcctcctcctacctgtccctgacccctgagcagtggaag |
| | | | Sequence | tcccaccggtcctacagctgccaagtgacccacgagggctccaccgtggaaaagaccgtg |
| | | | Version A | gctcctaccgagtgctcc |
| 463 | | | Cλ Light Chain | ggccagcctaaagctgcccccagcgtcaccctgtttcctccctccagcgaggagctccag |
| | | | Constant | gccaacaaggccaccctcgtgtgcctgatctccgacttctatcccggcgctgtgaccgtg |
| | | | Region (IGLC2*01) | gcttggaaagccgactccagccctgtcaaagccggcgtggagaccaccacaccctccaag |
| | | | Nucleotide | cagtccaacaacaagtacgccgcctccagctatctctccctgacccctgagcagtggaag |
| | | | Sequence | tcccaccggtcctactcctgtcaggtgacccacgagggctccaccgtggaaaagaccgtc |
| | | | Version B | gcccccaccgagtgctcc |
| 464 | Human Cλ | IGLC2*01 | Cλ Light Chain | GQPKAAPSVTLFPPSSEELQANKATLVCLISDFYPGAVTVAWKADSSPVKAGVETTTPSK |
| | constant | IGLC2*02 | Constant | QSNNKYAASSYLSLTPEQWKSHRSYSCOVTHEGSTVEKTVAPTECS |
| | region | or | Region (IGLC1*02) | |
| | | IGLC2*03 | Amino | |
| | | | Acid Sequence | |
| 465 | Human Cλ | | Cλ Light Chain | ggtcagcccaaggctgccccctcggtcactctgttcccgccctcctctgaggagcttcaa |
| | constant | | Constant | gccaacaaggccacactggtgtgtctcataagtgacttctacccgggagccgtgacagtg |
| | region | | Region (IGLC2*02 | gcctggaaggcagatagcagccccgtcaagggggagtggagaccaccacaccctccaaa |
| | | | or IGLC2*03) | caaagcaacaacaagtacgcggccagcagctatctgagcctgacgcctgagcagtggaag |
| | | | Nucleotide | tcccacagaagctacagctgccaggtcacgcatgaagggagcaccgtggagaagacagtg |
| | | | Sequence | gcccctacagaatgttca |
| 467 | | | Cλ Light Chain | GQPKAAPSVTLFPPSSEELQANKATLVCLISDFYPGAVTVAWKADSSPVKAGVETTTPSK |
| | | | Constant Region | QSNNKYAASSYLSLTPEQWKSHRSYSCQVTHEGSTVEKTVAPTECS |
| | | | (IGLC2*02) Amino | |
| | | | Acid Sequence | |
| 468 | Human CA | IGLC3*01 | Cλ Light Chain | cccaaggctgccccctcggtcactctgttcccaccctcctctgaggagcttcaagccaac |
| | constant | | Constant | aaggccacactggtgtgtctcataagtgacttctacccgggagccgtgacagttgcctgg |
| | region | | Region (IGLC3*01) | aaggcagatagcagccccgtcaaggcgggggtggagaccaccacaccctccaaacaaagc |
| | | | Nucleotide | aacaacaagtacgcggccagcagctacctgagcctgacgcctgagcagtggaagtcccac |
| | | | Sequence | aaaagctacagctgccaggtcacgcatgaagggagcaccgtggagaagacagttgcccct |
| | | | | acggaatgttca |
| 469 | | | Cλ Light Chain | PKAAPSVTLFPPSSEELQANKATLVCLISDFYPGAVTVAWKADSSPVKAGVETTTPSKQS |
| | | | Constant | NNKYAASSYLSLTPEQWKSHKSYSCQVTHEGSTVEKTVAPTECS |
| | | | Region (IGLC3*01) | |
| | | | Amino | |
| | | | Acid Sequence | |
| 470 | Human Cλ | IGLC3*02 | Cλ Light Chain | ggtcagcccaaggctgccccctcggtcactctgttcccaccctcctctgaggagcttcaa |
| | constant | | Constant Region | gccaacaaggccacactggtgtgtctcataagtgacttctacccggggccagtgacagtt |
| | region | | (IGLC3*02) | gcctggaaggcagatagcagccccgtcaagggggggggagaccaccacaccctccaaa |
| | | | Nucleotide | caaagcaacaacaagtacgcggccagcagctacctgagcctgacgcctgagcagtggaag |
| | | | Sequence | tcccacaaaagctacagctgccaggtcacgcatgaagggagcaccgtggagaagacagtg |
| | | | | gcccctacggaatgttca |
| 471 | | | Cλ Light Chain | GQPKAAPSVTLFPPSSEELQANKATLVCLISDFYPGPVTVAWKADSSPVKAGVETTTPSK |
| | | | Constant | QSNNKYAASSYLSLTPEQWKSHKSYSCQVTHEGSTVEKTVAPTECS |
| | | | Region (IGLC1*02) | |
| | | | Amino | |
| | | | Acid Sequence | |
| 472 | Human Cλ | IGLC3*03 | Cλ Light Chain | ggtcagcccaaggctgccccctcggtcactctgttcccaccctcctctgaggagcttcaa |
| | constant | | Constant | gccaacaaggccacactggtgtgtctcataagtgacttctacccgggagccgtgacagtg |
| | region | | Region (IGLC3*03) | gcctggaaggcagatagcagccccgtcaaggcgggagtggagaccaccacaccctccaaa |
| | | | Nucleotide | caaagcaacaacaagtacgcggccagcagctacctgagcctgacgcctgagcagtggaag |
| | | | Sequence | tcccacaaaagctacagctgccaggtcacgcatgaagggagcaccgtggagaagacagtg |
| | | | | gcccctacagaatgttca |
| 473 | | | Cλ Light Chain | GQPKAAPSVTLFPPSSEELQANKATLVCLISDFYPGAVTVAWKADSSPVKAGVETTTPSK |
| | | | Constant | QSNNKYAASSYLSLTPEQWKSHKSYSCQVTHEGSTVEKTVAPTECS |
| | | | Region (IGLC3*03) | |
| | | | Amino | |
| | | | Acid Sequence | |
| 474 | Human Cλ | IGLC3*04 | Cλ Light Chain | ggtcagcccaaggctgccccctcggtcactctgttcccgccctcctctgaggagcttcaa |
| | constant | | Constant | gccaacaaggccacactggtgtgtctcataagtgacttctacccgggagccgtgacagtg |
| | region | | Region (IGLC3*04) | gcctggaaggcagatagcagccccgtcaaggcgggagtggagaccaccacaccctccaaa |
| | | | Nucleotide | caaagcaacaacaagtacgcggccagcagctacctgagcctgacgcctgagcagtggaag |
| | | | Sequence | tcccacagaagctacagctgccaggtcacgcatgaagggagcaccgtggagaagacagtg |
| | | | | gcccctacagaatgttca |
| 475 | | | Cλ Light Chain | GQPKAAPSVTLFPPSSEELQANKATLVCLISDFYPGAVTVAWKADSSPVKAGVETTTPSK |
| | | | Constant | QSNNKYAASSYLSLTPEQWKSHRSYSCQVTHEGSTVEKTVAPTECS |
| | | | Region (IGLC3*04) | |
| | | | Amino | |
| | | | Acid Sequence | |
| 476 | Human Cλ | IGLC6*01 | Cλ Light Chain | ggtcagcccaaggctgccccatcggtcactctgttcccgccctcctctgaggagcttcaa |
| | constant | | Constant | gccaacaaggccacactggtgtgcctgatcagtgacttctacccgggagctgtgaaagtg |
| | region | | Region (IGLC6*01) | gcctggaaggcagatggcagccccgtcaacacgggagtggagaccaccacaccctccaaa |
| | | | Nucleotide | cagagcaacaacaagtacgcggccagcagctacctgagcctgacgcctgagcagtggaag |
| | | | Sequence | tcccacagaagctacagctgccaggtcacgcatgaagggagcaccgtggagaagacagtg |
| | | | | gcccctgcagaatgttca |
| 477 | | | Cλ Light Chain | GQPKAAPSVTLFPPSSEELQANKATLVCLISDFYPGAVKVAWKADGSPVNTGVETTTPSK |
| | | | Constant | QSNNKYAASSYLSLTPEQWKSHRSYSCQVTHEGSTVEKTVAPAECS |
| | | | Region (IGLC6*01) | |
| | | | Amino | |
| | | | Acid Sequence | |
| 478 | Human Cλ | IGLC7*01 | Cλ Light Chain | ggtcagcccaaggctgccccatcggtcactctgttcccaccctcctctgaggagcttcaa |
| | constant | or | Constant | gccaacaaggccacactggtgtgtctcgtaagtgacttctacccgggagccgtgacagtg |
| | region | IGLC7*02 | Region (IGLC7*01 | gcctggaaggcagatggcagccccgtcaaggtgggagtggagaccaccaaaccctccaaa |
| | | | or IGLC7*02) | caaagcaacaacaagtatgcggccagcagctacctgagcctgacgcccgagcagtggaag |
| | | | Nucleotide | tcccacagaagctacagctgccgggtcacgcatgaagggagcaccgtggagaagacagtg |
| | | | Sequence | gcccctgcagaatgctct |
| 479 | | | Cλ Light Chain | GQPKAAPSVTLFPPSSEELQANKATLVCLVSDFYPGAVTVAWKADGSPVKVGVETTKPSK |
| | | | Constant Region | QSNNKYAASSYLSLTPEQWKSHRSYSCRVTHEGSTVEKTVAPAECS |
| | | | (IGLC7*01) Amino | |
| | | | Acid Sequence | |
| 480 | Human Cλ | IGLC7*03 | Cλ Light Chain | GGTCAGCCCAAGGCTGCCCCCTCGGTCACTCTGTTCCCACCCTCCTCTGAGGAGCTTCAA |
| | constant | | Constant Region | GCCAACAAGGCCACACTGGTGTGTCTCGTAAGTGACTTCAACCCGGGAGCCGTGACAGTG |
| | region | | (IGLC7*03) | GCCTGGAAGGCAGATGGCAGCCCCGTCAAGGTGGGAGTGGAGACCACCAAACCCTCCAAA |
| | | | Nucleotide | CAAAGCAACAACAAGTATGCGGCCAGCAGCTACCTGAGCCTGACGCCCGAGCAGTGGAAG |
| | | | Sequence | TCCCACAGAAGCTACAGCTGCCGGGTCACGCATGAAGGGAGCACCGTGGAGAAGACAGTG |
| | | | | GCCCCTGCAGAATGCTCT |
| 481 | | | Cλ Light Chain | GQPKAAPSVTLFPPSSEELQANKATLVCLVSDENPGAVTVAWKADGSPVKVGVETTKPSK |
| | | | Constant Region | QSNNKYAASSYLSLTPEQWKSHRSYSCRVTHEGSTVEKTVAPAECS |
| | | | (IGLC7*03) Amino | |
| | | | Acid Sequence | |
| 482 | Human IgG4- | IGHG4-PE | Human Heavy | GCTTCTACCAAGGGACCCAGCGTGTTCCCTCTGGCTCCTTGCTCCAGATCCACCTCCGAG |
| | PE constant | IGHG4-PE | Chain Constant | TCTACAGCTGCTCTGGGCTGCCTGGTCAAGGACTACTTTCCTGAGCCTGTGACCGTGTCT |
| | region | | Region (IGHG4- | TGGAACTCTGGCGCTCTGACATCTGGCGTGCACACATTCCCTGCTGTGCTGCAGTCCTCC |
| | Human IgG4- | | PE) Nucleotide | GGCCTGTACTCTCTGTCCTCTGTCGTGACCGTGCCTTCCTCTAGCCTGGGCACCAAGACC |
| | PE constant | | Sequence | TACACCTGTAATGTGGACCACAAGCCTTCCAACACCAAGGTGGACAAGCGCGTGGAATCT |
| | region | | (lysine clipped) | AAGTACGGCCCTCCTTGTCCTCCATGTCCTGCTCCAGAGTTTGAAGGCGGCCCTTCCGTG |
| | | | | TTTCTGTTCCCTCCAAAGCCTAAGGACACCCTGATGATCTCTCGGACCCCTGAAGTGACC |
| | | | | TGCGTGGTGGTGGATGTGTCCCAAGAGGATCCCGAGGTGCAGTTCAATTGGTACGTGGAC |
| | | | | GGCGTGGAAGTGCACAACGCCAAGACCAAGCCTAGAGAGGAACAGTTCAACTCCACCTAC |
| | | | | AGAGTGGTGTCCGTGCTGACCGTGCTGCACCAGGATTGGCTGAACGGCAAAGAGTACAAG |
| | | | | TGCAAGGTGTCCAACAAGGGCCTGCCTAGCTCCATCGAAAAGACCATCTCCAAGGCCAAG |
| | | | | GGCCAGCCTCGAGAACCCCAGGTTTACACCCTGCCTCCAAGCCAAGAGGAAATGACCAAG |
| | | | | AACCAGGTGTCCCTGACCTGCCTCGTGAAGGGATTCTACCCCTCCGATATCGCCGTGGAA |
| | | | | TGGGAGTCTAATGGCCAGCCAGAGAACAACTACAAGACAACCCCTCCTGTGCTGGACTCC |
| | | | | GACGGCTCCTTCTTTCTGTATTCCCGCCTGACCGTGGACAAGTCCAGATGGCAAGAGGGC |
| | | | | AACGTGTTCTCCTGCAGCGTGATGCACGAGGCCCTGCACAATCACTACACCCAGAAGTCC |
| | | | | CTGTCTCTGTCCCTGGGC |
| 483 | | | Human Heavy | ASTKGPSVFPLAPCSRSTSESTAALGCLVKDYFPEPVTVSWNSGALTSGVHTFPAVLQSS |
| | | | Chain Constant | GLYSLSSVVTVPSSSLGTKTYTCNVDHKPSNTKVDKRVESKYGPPCPPCPAPEFEGGPSV |
| | | | Region (IGHG4- | FLFPPKPKDTLMISRTPEVTCVVVDVSQEDPEVQFNWYVDGVEVHNAKTKPREEQFNSTY |
| | | | PE) Protein | RVVSVLTVLHQDWLNGKEYKCKVSNKGLPSSIEKTISKAKGQPREPQVYTLPPSQEEMTK |
| | | | Sequence | NQVSLTCLVKGFYPSDIAVEWESNGQPENNYKTTPPVLDSDGSFFLYSRLTVDKSRWQEG |
| | | | (lysine clipped) | NVFSCSVMHEALHNHYTQKSLSLSLG |
| 484 | Human IGHA1 | | | ASPTSPKVFPLSLCSTQPDGNVVIACLVQGFFPQEPLSVTWSESGQGVTARNFP |
| | constant | | | PSQDASGDLYTTSSQLTLPATQCLAGKSVTCHVKHYTNPSQDVTVPCPVPSTPP |
| | region | | | TPSPSTPPTPSPSCCHPRLSLHRPALEDLLLGSEANLTCTLTGLRDASGVTFTW |
| | | | | TPSSGKSAVQGPPERDLCGCYSVSSVLPGCAEPWNHGKTFTCTAAYPESKTPLT |
| | | | | ATLSKSGNTFRPEVHLLPPPSEELALNELVTLTCLARGFSPKDVLVRWLOGSQE |
| | | | | LPREKYLTWASRQEPSQGTTTFAVTSILRVAAEDWKKGDTFSCMVGHEALPLAF |
| | | | | TQKTIDRLAGKPTHVNVSVVMAEVDGTCY |
| 485 | Human | | | ASPTSPKVFPLSLDSTPQDGNVVVACLVQGFFPQEPLSVTWSESGQNVTARNFPPSQDAS |
| | IGHA2 | | | GDLYTTSSQLTLPATQCPDGKSVTCHVKHYTNSSQDVTVPCRVPPPPPCCHPRLSLHRPA |
| | constant | | | LEDLLLGSEANLTCTLTGLRDASGATFTWTPSSGKSAVQGPPERDLCGCYSVSSVLPGCA |
| | region | | | QPWNHGETFTCTAAHPELKTPLTANITKSGNTFRPEVHLLPPPSEELALNELVTLTCLAR |
| | | | | GFSPKDVLVRWLQGSQELPREKYLTWASRQEPSQGTTTYAVTSILRVAAEDWKKGETFSC |
| | | | | MVGHEALPLAFTQKTIDRMAGKPTHINVSVVMAEADGTCY |

| | heavy chain v | heavy chain j | light chain v | light chain j |
|---|---|---|---|---|
| Ab name | gene segment | gene segment | gene segment | gene segment |
| IMPI-001 | IGHV4-4*02 | IGHJ4*02 | IGKV2D-30*01 | IGKJ4*01 |
| IMPI-002 | IGHV3-53*01 | IGHJ6*02 | IGKV1-9*d01 | IGKJ4*01 |
| IMPI-003 | IGHV3-9*01 | IGHJ6*02 | IGKV1-6*01 | IGKJ1*01 |
| IMPI-004 | IGHV3-33*01 | IGHJ6*02 | IGKV3-20*01 | IGKJ4*01 |
| IMPI-005 | IGHV3-53*01 | IGHJ6*02 | IGKV1-9*d01 | IGKJ5*01 |
| IMPI-006 | IGHV4-39*01 | IGHJ6*02 | IGKV1D-16*01 | IGKJ4*01 |
| IMPI-007 | IGHV4-4*02 | IGHJ4*02 | IGKV2D-30*01 | IGKJ4*01 |
| IMPI-008 | IGHV3-9*01 | IGHJ6*02 | IGKV1D-13*d01 | IGKJ4*01 |
| IMPI-009 | IGHV5-51*01 | IGHJ4*02 | IGKV1D-13*d01 | IGKJ1*01 |
| IMPI-010 | IGHV3-9*01 | IGHJ6*02 | IGKV1D-13*d01 | IGKJ4*01 |
| IMPI-011 | IGHV5-51*01 | IGHJ4*02 | IGKV1D-13*d01 | IGKJ1*01 |
| IMPI-012 | IGHV3-53*01 | IGHJ6*02 | IGKV1-9*d01 | IGKJ4*01 |
| IMPI-013 | IGHV3-9*01 | IGHJ6*02 | IGKV1-6*01 | IGKJ1*01 |
| IMPI-014 | IGHV4-31*03 | IGHJ4*02 | IGKV1D-13*d01 | IGKJ4*01 |
| IMPI-015 | IGHV5-51*01 | IGHJ4*02 | IGKV1D-13*d01 | IGKJ1*01 |
| IMPI-016 | IGHV5-51*01 | IGHJ4*02 | IGKV1D-13*d01 | IGKJ1*01 |
| IMPI-017 | IGHV3-53*01 | IGHJ6*02 | IGKV1-9*d01 | IGKJ1*01 |
| IMPI-018 | IGHV4-31*03 | IGHJ4*02 | IGKV1D-13*d01 | IGKJ4*01 |
| IMPI-019 | IGHV4-4*02 | IGHJ4*02 | IGKV2D-30*01 | IGKJ4*01 |
| IMPI-020 | IGHV4-4*02 | IGHJ4*02 | IGKV2D-30*01 | IGKJ4*01 |
| IMPI-021 | IGHV3-53*01 | IGHJ6*02 | IGKV1-9*d01 | IGKJ2*04 |
| IMPI-022 | IGHV3-9*01 | IGHJ6*02 | IGKV1D-13*d01 | IGKJ4*01 |
| IMPI-023 | IGHV4-4*02 | IGHJ4*02 | IGKV2D-30*01 | IGKJ4*01 |
| IMPI-024 | IGHV5-51*01 | IGHJ4*02 | IGKV1D-13*d01 | IGKJ1*01 |
| IMPI-025 | IGHV4-4*02 | IGHJ4*02 | IGKV2D-30*01 | IGKJ4*01 |
| IMPI-026 | IGHV5-51*01 | IGHJ4*02 | IGKV1D-13*d01 | IGKJ1*01 |
| IMPI-027 | IGHV4-31*03 | IGHJ4*02 | IGKV1D-13*d01 | IGKJ4*01 |
| IMPI-028 | IGHV3-53*01 | IGHJ4*02 | IGKV3-20*01 | IGKJ1*01 |
| IMPI-029 | IGHV3-53*01 | IGHJ6*02 | IGKV1-9*d01 | IGKJ5*01 |
| IMPI-030 | IGHV4-4*02 | IGHJ4*02 | IGKV2D-30*01 | IGKJ4*01 |
| IMPI-031 | IGHV3-9*01 | IGHJ6*02 | IGKV1D-13*d01 | IGKJ4*01 |
| IMPI-032 | IGHV4-4*02 | IGHJ4*02 | IGKV2D-30*01 | IGKJ4*01 |
| IMPI-033 | IGHV4-31*03 | IGHJ4*02 | IGKV1D-13*d01 | IGKJ4*01 |
| IMPI-034 | IGHV5-51*01 | IGHJ4*02 | IGKV1D-13*d01 | IGKJ1*01 |
| IMPI-035 | IGHV3-9*01 | IGHJ6*02 | IGKV1D-13*d01 | IGKJ4*01 |
| IMPI-036 | IGHV1-8*01 | IGHJ4*02 | IGKV6-21*01 | IGKJ3*01 |
| IMPI-037 | IGHV3-15*01 | IGHJ4*02 | IGKV1-9*d01 | IGKJ1*01 |
| IMPI-038 | IGHV3-30*18 | IGHJ6*02 | IGKV1-12*01 | IGKJ1*01 |
| IMPI-039 | IGHV4-4*02 | IGHJ4*02 | IGKV2D-30*01 | IGKJ4*01 |
| IMPI-040 | IGHV4-4*02 | IGHJ4*02 | IGKV2D-30*01 | IGKJ4*01 |
| IMPI-041 | IGHV1-8*01 | IGHJ4*02 | IGKV6-21*01 | IGKJ3*01 |
| IMPI-042 | IGHV3-53*01 | IGHJ6*02 | IGKV1-33*01 | IGKJ5*01 |
| IMPI-043 | IGHV5-51*01 | IGHJ4*02 | IGKV1D-13*d01 | IGKJ1*01 |
| IMPI-044 | IGHV5-51*01 | IGHJ4*02 | IGKV1D-13*d01 | IGKJ1*01 |
| IMPI-045 | IGHV4-31*03 | IGHJ4*02 | IGKV1D-13*d01 | IGKJ4*01 |
| IMPI-046 | IGHV5-51*01 | IGHJ4*02 | IGKV1D-13*d01 | IGKJ1*01 |
| IMPI-047 | IGHV3-53*01 | IGHJ6*02 | IGKV1-9*d01 | IGKJ4*01 |
| IMPI-048 | IGHV4-31*03 | IGHJ4*02 | IGKV1D-13*d01 | IGKJ4*01 |
| IMPI-049 | IGHV5-51*01 | IGHJ4*02 | IGKV1D-13*d01 | IGKJ1*01 |
| IMPI-050 | IGHV5-51*01 | IGHJ4*02 | IGKV1D-13*d01 | IGKJ1*01 |
| IMPI-051 | IGHV5-51*01 | IGHJ4*02 | IGKV1D-13*d01 | IGKJ1*01 |
| IMPI-052 | IGHV3-53*01 | IGHJ6*02 | IGKV1-9*d01 | IGKJ4*01 |
| IMPI-053 | IGHV4-4*02 | IGHJ4*02 | IGKV2D-30*01 | IGKJ4*01 |
| IMPI-054 | IGHV3-53*01 | IGHJ6*02 | IGKV1-33*01 | IGKJ5*01 |
| IMPI-055 | IGHV1-8*01 | IGHJ4*02 | IGKV6-21*01 | IGKJ3*01 |
| IMPI-056 | IGHV3-53*01 | IGHJ6*02 | IGKV1-9*d01 | IGKJ5*01 |
| IMPI-057 | IGHV3-9*01 | IGHJ6*02 | IGKV1D-13*d01 | IGKJ4*01 |
| IMPI-058 | IGHV5-51*01 | IGHJ4*02 | IGKV1D-13*d01 | IGKJ1*01 |
| IMPI-059 | IGHV3-53*01 | IGHJ3*02 | IGKV1-33*01 | IGKJ2*04 |
| IMPI-060 | IGHV3-53*01 | IGHJ6*02 | IGKV1-9*d01 | IGKJ2*04 |
| IMPI-061 | IGHV3-20*d01 | IGHJ4*02 | IGKV3-20*01 | IGKJ2*04 |
| IMPI-062 | IGHV3-20*d01 | IGHJ4*02 | IGKV3-20*01 | IGKJ2*04 |
| IMPI-063 | IGHV3-20*d01 | IGHJ4*02 | IGKV3-20*01 | IGKJ2*04 |
| IMPI-064 | IGHV3-20*d01 | IGHJ4*02 | IGKV3-20*01 | IGKJ2*04 |
| IMPI-065 | IGHV3-20*d01 | IGHJ4*02 | IGKV3-20*01 | IGKJ2*04 |
| IMPI-066 | IGHV3-20*d01 | IGHJ4*02 | IGKV3-20*01 | IGKJ2*04 |
| IMPI-067 | IGHV3-30*18 | IGHJ6*02 | IGKV3-20*01 | IGKJ4*01 |
| IMPI-068 | IGHV3-30*18 | IGHJ6*02 | IGKV1D-13*d01 | IGKJ3*01 |
| IMPI-069 | IGHV3-20*d01 | IGHJ4*02 | IGKV3-20*01 | IGKJ2*04 |
| IMPI-070 | IGHV3-20*d01 | IGHJ4*02 | IGKV3-20*01 | IGKJ2*04 |
| IMPI-071 | IGHV3-20*d01 | IGHJ4*02 | IGKV3-20*01 | IGKJ2*04 |
| IMPI-072 | IGHV3-30*18 | IGHJ6*02 | IGKV3-20*01 | IGKJ4*01 |
| YANG-1101 | IGHV4-39*01 | IGHJ3*02 | IGLV2-23*d02 | IGLJ2*01 |
| YANG-1102 | IGHV4-4*02 | IGHJ4*02 | IGLV1-40*01 | IGLJ3*02 |
| YANG-1103 | IGHV3-53*01 | IGHJ4*02 | IGKV1-9*d01 | IGKJ5*01 |
| YANG-1105 | IGHV3-53*01 | IGHJ6*02 | IGKV1-9*d01 | IGKJ2*04 |
| YANG-1106 | IGHV3-53*01 | IGHJ4*02 | IGKV3-15*01 | IGKJ1*01 |
| YANG-1107 | IGHV3-53*01 | IGHJ4*02 | IGKV1-9*d01 | IGKJ5*01 |
| YANG-1108 | IGHV3-30*18 | IGHJ6*02 | IGKV1D-13*d01 | IGKJ4*01 |
| YANG-1109 | IGHV3-53*01 | IGHJ6*02 | IGKV1-9*d01 | IGKJ2*04 |
| YANG-1110 | IGHV3-30*18 | IGHJ6*02 | IGLV4-60*d03 | IGLJ1*01 |
| YANG-1111 | IGHV3-48*02 | IGHJ4*02 | IGLV3-21*d01 | IGLJ2*01 |
| YANG-1112 | IGHV2-5*10 | IGHJ3*02 | IGLV3-10*01 | IGLJ2*01 |
| YANG-1113 | IGHV3-21*03 | IGHJ4*02 | IGLV2-14*01 | IGLJ2*01 |
| YANG-1114 | IGHV3-21*03 | IGHJ4*02 | IGLV2-14*01 | IGLJ2*01 |
| YANG-1115 | IGHV3-21*03 | IGHJ4*02 | IGLV2-14*01 | IGLJ2*01 |
| YANG-1116 | IGHV3-21*03 | IGHJ4*02 | IGLV2-14*01 | IGLJ2*01 |
| YANG-1117 | IGHV3-21*03 | IGHJ4*02 | IGLV2-14*01 | IGLJ2*01 |
| YANG-1118 | IGHV3-21*03 | IGHJ4*02 | IGLV2-14*01 | IGLJ3*02 |
| YANG-1119 | IGHV3-21*03 | IGHJ4*02 | IGLV2-14*01 | IGLJ2*01 |
| YANG-1201 | IGHV4-4*02 | IGHJ6*02 | IGKV3-20*01 | IGKJ1*01 |
| YANG-1202 | IGHV3-7*01 | IGHJ6*02 | IGKV1-16*02 | IGKJ1*01 |
| YANG-1203 | IGHV3-9*01 | IGHJ6*02 | IGKV1-33*01 | IGKJ3*01 |
| YANG-1204 | IGHV3-30*18 | IGHJ3*02 | IGKV2-30*01 | IGKJ4*01 |
| YANG-1205 | IGHV1-46*03 | IGHJ4*02 | IGKV2D-29*01 | IGKJ1*01 |
| YANG-1206 | IGHV3-30*18 | IGHJ4*02 | IGLV1-40*01 | IGLJ3*02 |
| YANG-1207 | IGHV3-33*01 | IGHJ4*02 | IGLV3-1*01 | IGLJ2*01 |
| YANG-1301 | IGHV3-33*01 | IGHJ5*02 | IGLV3-1*01 | IGLJ2*01 |
| YANG-1302 | IGHV3-33*01 | IGHJ5*02 | IGLV3-1*01 | IGLJ2*01 |
| YANG-1303 | IGHV1-18*01 | IGHJ4*02 | IGLV3-10*01 | IGLJ3*02 |
| YANG-1304 | IGHV4-34*01 | IGHJ4*02 | IGLV3-10*01 | IGLJ3*02 |
| YANG-1305 | IGHV3-30*18 | IGHJ6*02 | IGKV1-27*01 | IGKJ3*01 |
| YANG-1401 | IGHV4-4*02 | IGHJ5*02 | IGKV1D-16*01 | IGKJ4*01 |
| YANG-1402 | IGHV3-53*01 | IGHJ6*02 | IGKV1-9*d01 | IGKJ4*01 |
| YANG-1403 | IGHV3-33*01 | IGHJ6*02 | IGKV1D-17*01 | IGKJ1*01 |
| YANG-2101 | IGHV3-13*01 | IGHJ4*02 | IGKV1-16*02 | IGKJ4*01 |
| YANG-2102 | IGHV3-13*01 | IGHJ6*02 | IGKV1-16*02 | IGKJ1*01 |
| YANG-2103 | IGHV3-53*01 | IGHJ6*02 | IGLV3-21*d01 | IGLJ1*01 |
| YANG-2104 | IGHV3-13*01 | IGHJ6*02 | IGKV1-16*02 | IGKJ1*01 |
| YANG-2105 | IGHV3-53*01 | IGHJ6*02 | IGKV1-9*d01 | IGKJ4*01 |
| YANG-2106 | IGHV3-33*01 | IGHJ6*02 | IGKV1D-17*01 | IGKJ1*01 |
| YANG-2107 | IGHV4-4*02 | IGHJ3*02 | IGLV2-23*d02 | IGLJ2*01 |
| YANG-2108 | IGHV4-4*02 | IGHJ3*02 | IGLV2-23*d02 | IGLJ2*01 |
| YANG-2109 | IGHV1-69*05 | IGHJ6*02 | IGKV1-17*01 | IGKJ4*01 |
| YANG-2110 | IGHV3-53*01 | IGHJ4*02 | IGKV3D-7*01 | IGKJ4*01 |
| YANG-2111 | IGHV3-9*01 | IGHJ4*02 | IGKV2-28*01 | IGKJ5*01 |
| YANG-2112 | IGHV1-24*d01 | IGHJ6*02 | IGLV1-47*01 | IGLJ2*01 |
| YANG-2201 | IGHV3-30*18 | IGHJ4*02 | IGKV2D-28*d01 | IGKJ5*01 |
| YANG-2202 | IGHV3-23*04 | IGHJ4*02 | IGKV1-12*01 | IGKJ5*01 |
| YANG-2203 | IGHV1-46*03 | IGHJ3*02 | IGLV1-51*01 | IGLJ2*01 |
| YANG-2204 | IGHV1-46*03 | IGHJ3*02 | IGLV1-51*01 | IGLJ3*02 |
| YANG-2205 | IGHV1-46*03 | IGHJ3*02 | IGLV1-51*01 | IGLJ3*02 |
| YANG-2206 | IGHV1-46*03 | IGHJ3*02 | IGLV1-51*01 | IGLJ3*02 |
| YANG-2207 | IGHV1-46*03 | IGHJ3*02 | IGLV1-51*01 | IGLJ3*02 |
| YANG-2208 | IGHV1-46*03 | IGHJ3*02 | IGLV1-51*01 | IGLJ3*02 |
| YANG-2301 | IGHV1-24*d01 | IGHJ6*02 | IGKV3-15*01 | IGKJ4*01 |
| YANG-2302 | IGHV1-24*d01 | IGHJ6*02 | IGKV3-20*01 | IGKJ2*04 |
| YANG-2303 | IGHV1-24*d01 | IGHJ6*02 | IGKV3-20*01 | IGKJ2*04 |
| YANG-2304 | IGHV1-24*d01 | IGHJ5*02 | IGLV2-8*01 | IGLJ2*01 |
| YANG-2305 | IGHV3-33*01 | IGHJ6*02 | IGLV3-1*01 | IGLJ2*01 |
| YANG-2306 | IGHV1-24*d01 | IGHJ5*02 | IGLV2-8*01 | IGLJ2*01 |

The application's sequence listing, which the Patent Office published only in electronic form, follows.

SEQUENCE LISTING (2370 sequences)

SEQ ID NO: 1 - DNA, 351 bp, Homo sapiens
gaggtgcagctggtggagtctggaggaggcttgatccagcctggggggtccctgagactctcctgtgcagcctctggggtcaccgtcagtagcaactacatgaactgggtccgccaggctccagggaaggggctggagggggtctcagttatttatagtggtggtaccacatactacgcagactccgtgaagggccgattcaccatctccagagacaattccaagaacacgctgtatcttcaaatgaacagcctgagagccgaggacacggccgtgtattactgtgcgagagatacggtggtctacggtatggacgtctggggccaagggaccacggtcaccgtctcctca

SEQ ID NO: 2 - protein, 117 aa, Homo sapiens
EVQLVESGGGLIQPGGSLRLSCAASGVTVSSNYMNWVRQAPGKGLEGVSVIYSGGTTYYADSVKGRFTISRDNSKNTLYLQMNSLRAEDTAVYYCARDTVVYGMDVWGQGTTVTVSS

SEQ ID NO: 3 - protein, 8 aa, Homo sapiens
GVTVSSNY

SEQ ID NO: 4 - protein, 7 aa, Homo sapiens
IYSGGTT

SEQ ID NO: 5 - protein, 11 aa, Homo sapiens
ARDTVVYGMDV

SEQ ID NO: 6 - DNA, 321 bp, Homo sapiens
gacatccagttgacccagtctccatccttcctgtctgcatctgtaggagacagagtcaccatcacttgctgggccagtcagggcattagcagttatttagcctggtatcagcaaaaaccagggaaagcccctaagctcctgatctatactgcatccactttgcaaagtggggtcccatcaaggttcagcggcagtggatctgggacagaattcactctcacaatcagcagcctgcagcctgaagattttgcaacttattactgtcaacagcttaatagttacccgctcactttcggcggagggaccaaggtggagatcaaa

SEQ ID NO: 7 - protein, 107 aa, Homo sapiens
DIQLTQSPSFLSASVGDRVTITCWASQGISSYLAWYQQKPGKAPKLLIYTASTLQSGVPSRFSGSGSGTEFTLTISSLQPEDFATYYCQQLNSYPLTFGGGTKVEIK

SEQ ID NO: 8 - protein, 6 aa, Homo sapiens
QGISSY

SEQ ID NO: 9 - skipped

SEQ ID NO: 10 - protein, 9 aa, Homo sapiens
QQLNSYPLT

SEQ ID NO: 11 - DNA, 351 bp, Homo sapiens
gaggtgcagctggtggagtctggaggaggcttgatccagcctggggggtccctgagactctcctgtgcagcctctgggttcaccgtcagtagcaactacatgaactgggtccgccaggctccagggaaggggctggagtgggtctcagttatttatagcggtggtagcacatactacgcagactccgtgaagggccgattcaccatctccagagacaattccaagaacacgctgtatcttcaaatgaacagcctgagaaccgaggacacggccgtgtattactgtgcgcgagatctagtggcttacggtatggacgtctggggccaagggaccacggtcaccgtctcctca

SEQ ID NO: 12 - protein, 117 aa, Homo sapiens
EVQLVESGGGLIQPGGSLRLSCAASGFTVSSNYMNWVRQAPGKGLEWVSVIYSGGSTYYADSVKGRFTISRDNSKNTLYLQMNSLRTEDTAVYYCARDLVAYGMDVWGQGTTVTVSS

SEQ ID NO: 13 - protein, 8 aa, Homo sapiens
GFTVSSNY

SEQ ID NO: 14 - protein, 7 aa, Homo sapiens
IYSGGST

SEQ ID NO: 15 - protein, 11 aa, Homo sapiens
ARDLVAYGMDV

SEQ ID NO: 16 - DNA, 321 bp, Homo sapiens
gacatccagttgacccagtctccatccttcctgtctgcatctgtaggagacagagtcaccatcacttgctgggccagtcagggcattagcagttatttagcctggtatcagcaaaaaccagggaaagcccctaaggtcctgatctatgctgcatccactttgcaaagtggggtcccatcaaggttcagcggcagtggatctgggacagaattcactctcacaatcagcagcctgcagcctgaagattttgcaacttattactgtcaactacttaatagtaacccgctcactttcggcggagggaccaaggtggagatcaaa

SEQ ID NO: 17 - protein, 107 aa, Homo sapiens
DIQLTQSPSFLSASVGDRVTITCWASQGISSYLAWYQQKPGKAPKVLIYAASTLQSGVPSRFSGSGSGTEFTLTISSLQPEDFATYYCQLLNSNPLTFGGGTKVEIK

SEQ ID NO: 18 - skipped

SEQ ID NO: 19 - protein, 9 aa, Homo sapiens
QLLNSNPLT

SEQ ID NO: 20 - DNA, 369 bp, Homo sapiens
gaagtgcagctggtggagtctgggggaggcttggtacagcctggcaggtccctgagactctcctgtgcagcctctggattcacctttgatgattatgccatgcactgggtccggcaagctccagggaagggcctggagtgggtctcaggtattagttggaatagtggtagcataggctatgcggactctgtgaagggccgattcaccatctccagagacaacgccaagaactccctgtatctgcaaatgaacagtctgagagctgaagacacggccttatattactgtgcaaaagatttgggactggggattggcttctattacggtttggacgtctggggccaggggaccacggtcaccgtctcctca

SEQ ID NO: 21 - protein, 123 aa, Homo sapiens
EVQLVESGGGLVQPGRSLRLSCAASGFTFDDYAMHWVRQAPGKGLEWVSGISWNSGSIGYADSVKGRFTISRDNAKNSLYLQMNSLRAEDTALYYCAKDLGLGIGFYYGLDVWGQGTTVTVSS

SEQ ID NO: 22 - protein, 8 aa, Homo sapiens
GFTFDDYA

SEQ ID NO: 23 - protein, 8 aa, Homo sapiens
ISWNSGSI

SEQ ID NO: 24 - protein, 16 aa, Homo sapiens
AKDLGLGIGFYYGLDV

SEQ ID NO: 25 - DNA, 321 bp, Homo sapiens
gccatccaaatgacccagtctccatcctccctgtctgcatctgtaggagacagagtcaccatcacttgccgggcaagtcagggcattagaaatgatttaggctggtatcagcagaagccagggaaagcccctaagctcctgatctatgatgcatccactttacaaagtggggtcccatcgaggttcagcggcagtggatctggcacagatttcactctcaccctcagcagcctggagcctgaagatttagcaacttattactgtctacatcactacacttacccgtggacgttcggccatgggaccaaggtggaactcaaa

SEQ ID NO: 26 - protein, 107 aa, Homo sapiens
AIQMTQSPSSLSASVGDRVTITCRASQGIRNDLGWYQQKPGKAPKLLIYDASTLQSGVPSRFSGSGSGTDFTLTLSSLEPEDLATYYCLHHYTYPWTFGHGTKVELK

SEQ ID NO: 27 - protein, 6 aa, Homo sapiens
QGIRND

SEQ ID NO: 28 - skipped

SEQ ID NO: 29 - protein, 9 aa, Homo sapiens
LHHYTYPWT

SEQ ID NO: 30 - DNA, 354 bp, Homo sapiens
gaggtgcagctggtgcagtctggagcagaggtgaaaaagcccggggagtctctgaagatctcctgtaagggttctggatacagctttaccagctactggatcggctgggtgcgccagatgcccgggaaaggcctggagtggatggggatcatctatcctggtgactctgataccaggaacagcccgtccttccaaggccaggtcaccatctcagccgacaagtccatcagcaccgcctacctgcagtggagcagcctgaaggcctcggacaccgccatgtattactgtgcgaggtcgtataactggaactactttgactactggggccagggaaccctggtcaccgtctcctca

SEQ ID NO: 31 - protein, 118 aa, Homo sapiens
EVQLVQSGAEVKKPGESLKISCKGSGYSFTSYWIGWVRQMPGKGLEWMGIIYPGDSDTRNSPSFQGQVTISADKSISTAYLQWSSLKASDTAMYYCARSYNWNYFDYWGQGTLVTVSS

SEQ ID NO: 32 - protein, 8 aa, Homo sapiens
GYSFTSYW

SEQ ID NO: 33 - protein, 8 aa, Homo sapiens
IYPGDSDT

SEQ ID NO: 34 - protein, 11 aa, Homo sapiens
ARSYNWNYFDY

SEQ ID NO: 35 - DNA, 321 bp, Homo sapiens
gccatccagttgacccagtctccatcctccctgtctgcatctgtaggagacagagtcaccatcacttgccgggcaagtcagggcattagcagtgctttagcctggtatcagcagaaaccagggaaagctcctaagctcctgatctatgatgcctccagtttggaaagtggggtcccatcaaggttcagcggcagtggatctgggacagatttcactctcaccatcagcagcctgcagcctgaagattttgcagcttattactgtcaacagtttattagttatccttggacgttcggccaagggaccaaggtggaaatcaaa

SEQ ID NO: 36 - protein, 107 aa, Homo sapiens
AIQLTQSPSSLSASVGDRVTITCRASQGISSALAWYQQKPGKAPKLLIYDASSLESGVPSRFSGSGSGTDFTLTISSLQPEDFAAYYCQQFISYPWTFGQGTKVEIK

SEQ ID NO: 37 - protein, 6 aa, Homo sapiens
QGISSA

SEQ ID NO: 38 - protein, 9 aa, Homo sapiens
QQFISYPWT

SEQ ID NO: 39 - DNA, 363 bp, Homo sapiens
caggtgcagctgcaggagtcgggcccaggactggtgaagccttcacagaccctgtccctcacctgcactgtctctggtggctccatcagcagttatggttactactggagctggatccgccagcacccagggaagggcctggagtggattgggtacatctattacagtgggagcacctactacaacccgtccctcaagagtcgagctaccatatcagtagacacgtctaagaaccagctctccctgaggctgaactctgtcagtgccgcggacacggccgtgtattactgtgcgagagacttcggtggtaactcgaactactttgactactggggccagggaagcctggtcaccgtctcctca

SEQ ID NO: 40 - protein, 121 aa, Homo sapiens
QVQLQESGPGLVKPSQTLSLTCTVSGGSISSYGYYWSWIRQHPGKGLEWIGYIYYSGSTYYNPSLKSRATISVDTSKNQLSLRLNSVSAADTAVYYCARDFGGNSNYFDYWGQGSLVTVSS

SEQ ID NO: 41 - protein, 10 aa, Homo sapiens
GGSISSYGYY

SEQ ID NO: 42 - protein, 7 aa, Homo sapiens
IYYSGST

SEQ ID NO: 43 - protein, 13 aa, Homo sapiens
ARDFGGNSNYFDY

SEQ ID NO: 44 - DNA, 321 bp, Homo sapiens
gccatccagttgacccagtctccatcctccctgtctgcatctgtaggagacagagtctccatcacttgccgggcaagtcaggtcattagtagtgctttagcctggtatcagcagaaaccagggaaagctcctaagctcctgatctatgatgcctccagtttggaaagtggggtcccatcaaggttcagcggcagtggatctgggacagatttcactctcaccatcagcagcctgcagcctgaagattttacaacttattactgtcaacagtttaatagttaccctctcactttcggcggagggaccacggtggagatcaaa

SEQ ID NO: 45 - protein, 107 aa, Homo sapiens
AIQLTQSPSSLSASVGDRVSITCRASQVISSALAWYQQKPGKAPKLLIYDASSLESGVPSRFSGSGSGTDFTLTISSLQPEDFTTYYCQQFNSYPLTFGGGTTVEIK

SEQ ID NO: 46 - protein, 6 aa, Homo sapiens
QVISSA

SEQ ID NO: 47 - protein, 9 aa, Homo sapiens
QQFNSYPLT

SEQ ID NO: 48 - DNA, 363 bp, Homo sapiens
caggtgcagctgcaggagtcgggcccaggactggtgaagccttcacagaccctgtccctcacctgcactgtctctggtggctccatcagcagttatggttactactggagctggatccgccagcacccagggaagggcctggagtggattgggtacatctattacagtgggagcacctactacaacccgtccctcaagagtcgagctaccatatcagtagacacgtctaagaaccagctctccctgaggctgaactctgtcagtgccgcggacacggccgtgtattactgtgcgagagacttcggtggtaactcgaactactttgactactggggccagggaaccctggtcaccgtctcctca

SEQ ID NO: 49 - protein, 121 aa, Homo sapiens
QVQLQESGPGLVKPSQTLSLTCTVSGGSISSYGYYWSWIRQHPGKGLEWIGYIYYSGSTYYNPSLKSRATISVDTSKNQLSLRLNSVSAADTAVYYCARDFGGNSNYFDYWGQGTLVTVSS

SEQ ID NO: 50 - DNA, 321 bp, Homo sapiens
gccatccagttgacccagtctccatcctccctgtctgcatctgtaggagacagggtcaccatcacttgccgggcaagtcagggcattagcagtgctttagcctggtatcagcagaaaccaggtaaagctcctaagctcctgatctatgatgcctccagtttggaaagtggggtcccatcaaggttcagcggcagtggatctgggacagatttcactctcaccatcagcagcctgcagcctgaagattttacaacttattactgtcaacagtttaatagttaccctctcactttcggcggagggaccaaggtggagatcaaa

SEQ ID NO: 51 - protein, 107 aa, Homo sapiens
AIQLTQSPSSLSASVGDRVTITCRASQGISSALAWYQQKPGKAPKLLIYDASSLESGVPSRFSGSGSGTDFTLTISSLQPEDFTTYYCQQFNSYPLTFGGGTKVEIK

SEQ ID NO: 52 - DNA, 363 bp, Homo sapiens
gaggtgcagctggtggagtctggaggaggcttgatccagccgggggggtccctgagactctcctgtgcagcctctgggttcaccgtcagtagcatctacatgagctgggtccgccaggctccagggaaggggctggagtgggtctcaattatttatagccgtggtagtacagactacgcagactccgtgaagggccgattcaccatctccagagacatttccaagaacacgctgtatcttcaaatgaacagcctgagagccgaggacacggccgtgtattactgtgcgagagatgggactatggttcggggagttcatgcttttgatatctggggccaagggacaatggtcaccgtctcttca

SEQ ID NO: 53 - protein, 121 aa, Homo sapiens
EVQLVESGGGLIQPGGSLRLSCAASGFTVSSIYMSWVRQAPGKGLEWVSIIYSRGSTDYADSVKGRFTISRDISKNTLYLQMNSLRAEDTAVYYCARDGTMVRGVHAFDIWGQGTMVTVSS

SEQ ID NO: 54 - protein, 8 aa, Homo sapiens
GFTVSSIY

SEQ ID NO: 55 - protein, 7 aa, Homo sapiens
IYSRGST

SEQ ID NO: 56 - protein, 15 aa, Homo sapiens
ARDGTMVRGVHAFDI

SEQ ID NO: 57 - DNA, 321 bp, Homo sapiens
gacatccagatgacccagtctccaccctccctgtctgcatctataggagacagagtcaccatcacttgccaggcgagtcaggacattagcaactatttaaattggtatcagcagaaaccagggaaagcccctaagctcctgatctacgatgcatccaatttggaaacaggggtcccatcaaggttcagtggaagtggatctgggacagattttactctcaccatcagcaacctgcagcctgaagatattgtaacatattactgtcaacagtatgataatctcccgagcagttttggccaggggaccaagctggagatcaaa

SEQ ID NO: 58 - protein, 107 aa, Homo sapiens
DIQMTQSPPSLSASIGDRVTITCQASQDISNYLNWYQQKPGKAPKLLIYDASNLETGVPSRFSGSGSGTDFTLTISNLQPEDIVTYYCQQYDNLPSSFGQGTKLEIK

SEQ ID NO: 59 - protein, 6 aa, Homo sapiens
QDISNY

SEQ ID NO: 60 - protein, 9 aa, Homo sapiens
QQYDNLPSS

SEQ ID NO: 61 - DNA, 366 bp, Homo sapiens
gaagtgcagctggtggagtctgggggaggcttggtacagcctggcaggtccctgagactctcctgtgcagcctctggattcacctttgatgattatgccatacactgggtccggcaagctccagggaagggcctggaatgggtctcaggtattacttggaatagtggtagcataggctatgcggactctgtgaagggccgattcaccatctccagagacaacgccaagaactccctgtatctgcaaatgaacagtctgagagctgaggatacggccttgtattactgtgcaaaagatctccagggggactactactactacggtatggacgtctggggccaagggaccacggtcaccgtctcctca

SEQ ID NO: 62 - protein, 122 aa, Homo sapiens
EVQLVESGGGLVQPGRSLRLSCAASGFTFDDYAIHWVRQAPGKGLEWVSGITWNSGSIGYADSVKGRFTISRDNAKNSLYLQMNSLRAEDTALYYCAKDLQGDYYYYGMDVWGQGTTVTVSS

SEQ ID NO: 63 - protein, 8 aa, Homo sapiens
ITWNSGSI

SEQ ID NO: 64 - protein, 15 aa, Homo sapiens
AKDLQGDYYYYGMDV

SEQ ID NO: 65 - DNA, 321 bp, Homo sapiens
gccatccagttgacccagtctccatcctccctgtctgcatctgtaggagacagagtcaccatcacttgccgggctagtcaggacattagcagtgctttagcctggtatcagcagaaagcagggaaagctcctaagctcctgatctatgatggctccagttttaaaagtggggtcccatcaaggttcagcggcagtagatctgggacagatttcactctcaccatcagcagcctgcagcctgaagattttgcaacttattactgtcaacagtttattagttacccgctcactttcggcggagggaccagggtggagatcaaa

SEQ ID NO: 66 - protein, 107 aa, Homo sapiens
AIQLTQSPSSLSASVGDRVTITCRASQDISSALAWYQQKAGKAPKLLIYDGSSFKSGVPSRFSGSRSGTDFTLTISSLQPEDFATYYCQQFISYPLTFGGGTRVEIK

SEQ ID NO: 67 - protein, 6 aa, Homo sapiens
QDISSA

SEQ ID NO: 68 - skipped

SEQ ID NO: 69 - protein, 9 aa, Homo sapiens
QQFISYPLT

SEQ ID NO: 70 - DNA, 354 bp, Homo sapiens
gaggtgcagctggtgcagtctggagcagaggtgaaaaagcccggggagtctctgaagatctcctgtaagggttctggatacagctttaccatctactggatcggctgggtgcgccagatgcccgggaaaggcctggagtggatggggatcatctatcctggtgactctgataccagatacagcccgtccttccaaggccaggtcaccatctcagccgacaagtccatcagcaccgcctacctgcagtggagcagcctgaaggcctcggacaccgccatgtattactgtgcgaggtcgtataactggaactactttgactactggggccagggaaccctggtcaccgtctcctca

SEQ ID NO: 71 - protein, 118 aa, Homo sapiens
EVQLVQSGAEVKKPGESLKISCKGSGYSFTIYWIGWVRQMPGKGLEWMGIIYPGDSDTRYSPSFQGQVTISADKSISTAYLQWSSLKASDTAMYYCARSYNWNYFDYWGQGTLVTVSS

SEQ ID NO: 72 - protein, 8 aa, Homo sapiens
GYSFTIYW

SEQ ID NO: 73 - DNA, 321 bp, Homo sapiens
gccatccagttgacccagtctccatcctccctgtctgcatctgtaggagacagagtcaccatcacttgccgggcaagtcagggcattaacagtgctttagcctggtatcagcagaaaccagggaaaactcctaaactcctaatctatgatgcctccagtttggaaagtggggtcccatcaaggttcagcggcagtggatctgggacagatttcactctcaccatcagcagcctgcagcctgaagattttgcaacttattactgtcaacagtttaatagttacccttggacgttcggccaagggaccaaggtggaaatcaaa

SEQ ID NO: 74 - protein, 107 aa, Homo sapiens
AIQLTQSPSSLSASVGDRVTITCRASQGINSALAWYQQKPGKTPKLLIYDASSLESGVPSRFSGSGSGTDFTLTISSLQPEDFATYYCQQFNSYPWTFGQGTKVEIK

SEQ ID NO: 75 - protein, 6 aa, Homo sapiens
QGINSA

SEQ ID NO: 76 - protein, 9 aa, Homo sapiens
QQFNSYPWT

SEQ ID NO: 77 - DNA, 348 bp, Homo sapiens
caggtgcagctgcaggagtcgggcccaggactggtgaagccttcggggaccctgtccctcacctgcgctgtctctggtggctccatcagcaggagtacctggtggagttgggtccgccagcccccagggaaggggctggagtggattggggaaatctctcatagtgggagcacccagtacaacccgtccctcaagagtcgagtcaccatatcactagacaagtccaagaaccagttctccctgaagctgaactctgtgaccgccgcggacacggccgtatattactgtgcgggagaggggtataactggaactactggggccagggaaccctggtcaccgtctcctca

SEQ ID NO: 78 - protein, 116 aa, Homo sapiens
QVQLQESGPGLVKPSGTLSLTCAVSGGSISRSTWWSWVRQPPGKGLEWIGEISHSGSTQYNPSLKSRVTISLDKSKNQFSLKLNSVTAADTAVYYCAGEGYNWNYWGQGTLVTVSS

SEQ ID NO: 79 - protein, 9 aa, Homo sapiens
GGSISRSTW

SEQ ID NO: 80 - protein, 7 aa, Homo sapiens
ISHSGST

SEQ ID NO: 81 - protein, 9 aa, Homo sapiens
AGEGYNWNY

SEQ ID NO: 82 - DNA, 336 bp, Homo sapiens
gatgttgtaatgactcagtctccactctccctgcccgtcacccttggacagccggcctccatctcctgcaggtctagtcaaagcctcgtatacagtgatggaaacacctacttgagttggtttcagcagaggccaggccaatctccaaggcgcctaatttataaggtttctaagtgggactctggggtcccagacagattcagcggcagtgggtcaggcactgatttcacactgaaaatcagcagggtggaggctgaggatgttgggatttattactgcatgcaaggtacacactggccgctcactttcggcggagggaccaaggtggagatcaaa

SEQ ID NO: 83 - protein, 112 aa, Homo sapiens
DVVMTQSPLSLPVTLGQPASISCRSSQSLVYSDGNTYLSWFQQRPGQSPRRLIYKVSKWDSGVPDRFSGSGSGTDFTLKISRVEAEDVGIYYCMQGTHWPLTFGGGTKVEIK

SEQ ID NO: 84 - protein, 11 aa, Homo sapiens
QSLVYSDGNTY

SEQ ID NO: 85 - skipped

SEQ ID NO: 86 - protein, 9 aa, Homo sapiens
MQGTHWPLT

SEQ ID NO: 87 - DNA, 354 bp, Homo sapiens
gaggtgcagctggtgcagtctggagcagaggtgaaaaagcccggggagtctctgaagatctcctgtaagggttctgaatacagatttaccagctactggatcggctgggtgcgccagatgcccgggaaaggcctggagtggatggggatcatctatcctggtgactctgataccagatacagcccgtccttccaaggccaggtcaccatctcagccgacaagtccatcagcaccgcctacctgcagtggagcagcctgaaggcctcggacaccgccatgtattactgtgcgaggtcgtataactggaactactttgactactggggccagggaaccctggtcaccgtctcctca

SEQ ID NO: 88 - protein, 118 aa, Homo sapiens
EVQLVQSGAEVKKPGESLKISCKGSEYRFTSYWIGWVRQMPGKGLEWMGIIYPGDSDTRYSPSFQGQVTISADKSISTAYLQWSSLKASDTAMYYCARSYNWNYFDYWGQGTLVTVSS

SEQ ID NO: 89 - protein, 8 aa, Homo sapiens
EYRFTSYW

SEQ ID NO: 90 - DNA, 321 bp, Homo sapiens
gccatccagttgacccagtctccttcctccctgtctgcatctgtaggagacagagtcaccatcacttgccggccaagtcagggcattagcagtggtttagcctggtatcagcagaaaccagggaaagctcctaacctcctgatctatgatgcctccagtttggaaagtggggtcccatcaaggttcagcggcagtggatctgggacagatttcactctcaccatcagcagcctgcagcctgaggattttgcaacttattactgtcaacagtttaaaagttacccttggacgttcggccaagggaccaaggtggaaatcaaa

SEQ ID NO: 91 - protein, 107 aa, Homo sapiens
AIQLTQSPSSLSASVGDRVTITCRPSQGISSGLAWYQQKPGKAPNLLIYDASSLESGVPSRFSGSGSGTDFTLTISSLQPEDFATYYCQQFKSYPWTFGQGTKVEIK

SEQ ID NO: 92 - protein, 6 aa, Homo sapiens
QGISSG

SEQ ID NO: 93 - protein, 9 aa, Homo sapiens
QQFKSYPWT

SEQ ID NO: 94 - DNA, 366 bp, Homo sapiens
gaagtgcagctggtggagtctgggggaggcttggtacagcctggcaggtccctgagactctcctgtgcagcctctggattcacctttgatgattatgccatgcactgggtccggcaatctccagggaagggcctggagtgggtctcaggtattagttggaatagtggttccataggctatgcggactctgtgaagggccgattcaccatctccagagacaacgccaagaactccctgtatctgcaaatgaacagtctgagagctgaggacacggccttgtattactgtgcaaaagatctccagggggacgactactactacggtatggacgtctggggccaagggaccacggtcaccgtctcctca

SEQ ID NO: 95 - protein, 122 aa, Homo sapiens
EVQLVESGGGLVQPGRSLRLSCAASGFTFDDYAMHWVRQSPGKGLEWVSGISWNSGSIGYADSVKGRFTISRDNAKNSLYLQMNSLRAEDTALYYCAKDLQGDDYYYGMDVWGQGTTVTVSS

SEQ ID NO: 96 - protein, 15 aa, Homo sapiens
AKDLQGDDYYYGMDV

SEQ ID NO: 97 - DNA, 321 bp, Homo sapiens
gccatccagttgacccagtctccatcctccctgtctgcatctgtaggagacagagtcaccatcacttgccgggcaagtcagggcattagcagtgctttagcctggtatcagcagaaaccagggaaagctcctaagctcctgatctttgatgcctccagtttggaaagtggggtcccatcaaggttcagcggcagtggatctgggacagatttcactttcaccatcagcagcctgcagcctgaagattttgcagctttttactgtcaacagtttattagttacccgctcactttcggcggagggaccaaggtggagatcaaa

SEQ ID NO: 98 - protein, 107 aa, Homo sapiens
AIQLTQSPSSLSASVGDRVTITCRASQGISSALAWYQQKPGKAPKLLIFDASSLESGVPSRFSGSGSGTDFTFTISSLQPEDFAAFYCQQFISYPLTFGGGTKVEIK

SEQ ID NO: 99 - DNA, 363 bp, Homo sapiens
caggtgcagctgcaggagtcgggcccaggactggtgaagccttcacagaccctgtccctcacctgcactgtctctggtggctccatcagcagttatggtttctactggagctggatccgccagcacccagggaagggcctggagtggattgggttcatctattacagtgggagcacctactacaacccgtccctcaagagtcgagctaccatatcagtagacacgtctaagaaccagctctccctgaggctgaactctgtcagtgccgcggacacggccgtgtattactgtgcgagagacttcggtggtaactcgaactactttgactactggggccagggaaccctggtcaccgtctcctca

SEQ ID NO: 100 - protein, 121 aa, Homo sapiens
QVQLQESGPGLVKPSQTLSLTCTVSGGSISSYGFYWSWIRQHPGKGLEWIGFIYYSGSTYYNPSLKSRATISVDTSKNQLSLRLNSVSAADTAVYYCARDFGGNSNYFDYWGQGTLVTVSS

SEQ ID NO: 101 - protein, 10 aa, Homo sapiens
GGSISSYGFY

SEQ ID NO: 102 - DNA, 321 bp, Homo sapiens
gccatccaattgacccagtctccatcctccctgtctgcgtctgttggagacagagtcaccatcacttgccgggcaagtcagggcattagcagtgctttagcctggtatcagcagaaaccagggaaagctcctcagctcctgatctatgatgcctccagtttggaaagtggggtcccatcgaggttcagcggcagtggatctgggacagatttcactctcaccatcagcagcctgcagcctgaagattttgcaacttattactgtcaacagtttaatagttaccctctcactttcggcggagggaccaaggtggagatcaaa

SEQ ID NO: 103 - protein, 107 aa, Homo sapiens
AIQLTQSPSSLSASVGDRVTITCRASQGISSALAWYQQKPGKAPQLLIYDASSLESGVPSRFSGSGSGTDFTLTISSLQPEDFATYYCQQFNSYPLTFGGGTKVEIK

SEQ ID NO: 104 - DNA, 351 bp, Homo sapiens
gaggtgcagctggtggagtctggaggaggcttgatccagcctggggggtccctgagactctcctgtgcagcctctgggttcaccgtcagtagcaactatatgaactgggtccgccaggctccagggaaggggctggagtgggtctcagttatttatagcggtggtagcacatactacgcagactccgtgaagggccgattcaccatctccagagacaattccaagaacacgctgtttcttcaaatgaacagcctgagagccgaggactcggccgtgtattactgtgcgagagatttgggaccctacggtgtggacgtctggggccaagggaccacggtcaccgtctcctca

SEQ ID NO: 105 - protein, 117 aa, Homo sapiens
EVQLVESGGGLIQPGGSLRLSCAASGFTVSSNYMNWVRQAPGKGLEWVSVIYSGGSTYYADSVKGRFTISRDNSKNTLFLQMNSLRAEDSAVYYCARDLGPYGVDVWGQGTTVTVSS

SEQ ID NO: 106 - protein, 11 aa, Homo sapiens
ARDLGPYGVDV

SEQ ID NO: 107 - DNA, 321 bp, Homo sapiens
gacatccagttgacccagtctccatccttcctgtctgcatctgtaggagacagagtcaccatcacttgctgggccagtcagggcattagcagttatttagcctggtatcagcaaaaaccagggaaagcccctaagctcctgatctatgctgcatccactttgcaaagtggggtcccatcaaggttcagcggcagtggatctgggacagaattcactctcacaatcagcagcctgcagcctgaagattttgcaacttattactgtcaagagcttaatagttaccctctcaccttcggccaagggacacgactggagattaaa

SEQ ID NO: 108 - protein, 107 aa, Homo sapiens
DIQLTQSPSFLSASVGDRVTITCWASQGISSYLAWYQQKPGKAPKLLIYAASTLQSGVPSRFSGSGSGTEFTLTISSLQPEDFATYYCQELNSYPLTFGQGTRLEIK

SEQ ID NO: 109 - protein, 9 aa, Homo sapiens
QELNSYPLT

SEQ ID NO: 110 - DNA, 369 bp, Homo sapiens
caggtgcagctggtggagtctgggggaggcgtggtccagcctgggaggtccctgagactctcctgtgcagcctctggattcaccttcagtagctatggcatgcactgggtccgccaggctccaggcaaggggctggagtgggtggcagttatatcatatgatggaagtgataaatactatgcagactccgtgaagggccgattcaccatctccagagacaattccaagaacacgctgtatctgcaaatgaacagcctgagagctgaggacacggctgtgtattactgtgcgaaaacagtggctggttattactactactactacggtatggacgtctggggccaagggaccacggtcaccgtctcctca

SEQ ID NO: 111 - protein, 123 aa, Homo sapiens
QVQLVESGGGVVQPGRSLRLSCAASGFTFSSYGMHWVRQAPGKGLEWVAVISYDGSDKYYADSVKGRFTISRDNSKNTLYLQMNSLRAEDTAVYYCAKTVAGYYYYYYGMDVWGQGTTVTVSS

SEQ ID NO: 112 - protein, 8 aa, Homo sapiens
GFTFSSYG

SEQ ID NO: 113 - protein, 8 aa, Homo sapiens
ISYDGSDK

SEQ ID NO: 114 - protein, 16 aa, Homo sapiens
AKTVAGYYYYYYGMDV

SEQ ID NO: 115 - DNA, 321 bp, Homo sapiens
gacatccagatgacccagtctccatcttccgtgtctgcatctgttggagacagagtcaccgtcacttgtcgggcgagtcaggatattagtagctggttagcctggtttcagcagaaaccagggaaagcccctaaattcctgatctatgatgcatccaatttggaaaatggagtcccatcaaggttcagtggcagtggatctgggacagatttcaccctcaccatcagcagcctgcagcctgaagattttgcaacttactattgtcaacaagctaaaagtttcccgtggacgttcggccaagggaccaaggtggaaatcaac

SEQ ID NO: 116 - protein, 107 aa, Homo sapiens
DIQMTQSPSSVSASVGDRVTVTCRASQDISSWLAWFQQKPGKAPKFLIYDASNLENGVPSRFSGSGSGTDFTLTISSLQPEDFATYYCQQAKSFPWTFGQGTKVEIN

SEQ ID NO: 117 - protein, 6 aa, Homo sapiens
QDISSW

SEQ ID NO: 118 - protein, 9 aa, Homo sapiens
QQAKSFPWT

SEQ ID NO: 119 - DNA, 381 bp, Homo sapiens
caggtgcagctggtgcagtctggggctgaggtgaagaagcctggggcctcagtgaaggtctcctgcaaggcttctggatacaccttcaccagttatgatatcaactgggtgcgacaggccactggccaagggcttgagtggatgggatggatgaaccctatcagtggtaacacaggctatgcacagaagttccagggcagagtcaccatgaccagaaacacctccataagcacagcctacatggagctgaacagcctgagatctgaggacacggccgtgtatttctgtgcgagaggcgggcgatattgtagtggtgttagctgctactccggagagccttttgactactggggccagggaaccctggtcaccgtctcctca

SEQ ID NO: 120 - protein, 127 aa, Homo sapiens
QVQLVQSGAEVKKPGASVKVSCKASGYTFTSYDINWVRQATGQGLEWMGWMNPISGNTGYAQKFQGRVTMTRNTSISTAYMELNSLRSEDTAVYFCARGGRYCSGVSCYSGEPFDYWGQGTLVTVSS

SEQ ID NO: 121 - protein, 8 aa, Homo sapiens
GYTFTSYD

SEQ ID NO: 122 - protein, 8 aa, Homo sapiens
MNPISGNT

SEQ ID NO: 123 - protein, 20 aa, Homo sapiens
ARGGRYCSGVSCYSGEPFDY

SEQ ID NO: 124 - DNA, 321 bp, Homo sapiens
gaaattgtgctgactcagtctccagactttcagtctgtgactccaaaggagaaagtcaccatcacctgccgggccagtcagagcattggtagtagcttacactggtaccagcagaaaccagatcagtctccaaagctcctcatcaagtatgcttcccagtccatctcaggggtcccctcgaggttcagtggcagtggatctgggacagatttcaccctcaccatcaatagcctggaagctgaagatgctgcagcgtattattgtcatcagagtagtagtttacctcacactttcggccctgggaccaaagtggagatcaaa

SEQ ID NO: 125 - protein, 107 aa, Homo sapiens
EIVLTQSPDFQSVTPKEKVTITCRASQSIGSSLHWYQQKPDQSPKLLIKYASQSISGVPSRFSGSGSGTDFTLTINSLEAEDAAAYYCHQSSSLPHTFGPGTKVEIK

SEQ ID NO: 126 - protein, 6 aa, Homo sapiens
QSIGSS

SEQ ID NO: 127 - skipped

SEQ ID NO: 128 - protein, 9 aa, Homo sapiens
HQSSSLPHT

SEQ ID NO: 129 - DNA, 348 bp, Homo sapiens
caggtgcagctgcaggagtcgggcccaggactggtgaagccttcggggaccctgtccctcacctgcgctgtctctggtggctccatcagcagtaataactggtggagttgggtccgccagcccccagggaagggtctggagtggattggggaaatcgatcatagtgggagcaccatgtacaacccgtccctcaagagtcgagtcaccatatcagtagacaagtccaagaaccagttctccctgaagctgaactctgtgaccgccgcggacacggccgtgtattactgtacgggagaggggtataactggaactactggggccaggggaccctggtcaccgtctcctca

SEQ ID NO: 130 - protein, 116 aa, Homo sapiens
QVQLQESGPGLVKPSGTLSLTCAVSGGSISSNNWWSWVRQPPGKGLEWIGEIDHSGSTMYNPSLKSRVTISVDKSKNQFSLKLNSVTAADTAVYYCTGEGYNWNYWGQGTLVTVSS

SEQ ID NO: 131 - protein, 9 aa, Homo sapiens
GGSISSNNW

SEQ ID NO: 132 - protein, 7 aa, Homo sapiens
IDHSGST

SEQ ID NO: 133 - protein, 9 aa, Homo sapiens
TGEGYNWNY

SEQ ID NO: 134 - DNA, 336 bp, Homo sapiens
gttgttgtgatgactcagtctccactctccctgcccgtcacccttggacagccggcctccatctcctgcaggtctagtcaaagcctcctatacactgatggaaacacctacttgagttggtttcagcagaggccaggccaatctccaaggcgcctaatttataaggtttctaactgggactctggggtcccagacagattcagcggcagtgggtcaggcactgatttcacactgaaaatcagcagggtggaggctgaagatgttgggatttattactgcatgcaaggtacacactggccgctcactttcggcggagggaccaaggtggagatcaaa

SEQ ID NO: 135 - protein, 112 aa, Homo sapiens
VVVMTQSPLSLPVTLGQPASISCRSSQSLLYTDGNTYLSWFQQRPGQSPRRLIYKVSNWDSGVPDRFSGSGSGTDFTLKISRVEAEDVGIYYCMQGTHWPLTFGGGTKVEIK

SEQ ID NO: 136 - protein, 11 aa, Homo sapiens
QSLLYTDGNTY

SEQ ID NO: 137 - DNA, 348 bp, Homo sapiens
caggtgcagctgcaggagtcgggcccaggactgataaagccttcggggaccctgtccctcacctgcgctgtctctggtggctccatcagcagtaatacctggtggagttgggtccgccagcccccagggaagggtctggagtggattggggaaatctatcatagtgggagcaccatgtacaacccgtccctcaagagtcgagtcaccatatcagtagacaagtccaagaaccagttctccctgaagttgaactctgtgaccgccgcggacacggccgtgtattactgtacgggagaggggcataactggaactactggggccaggggaccctggtcaccgtctcctca

SEQ ID NO: 138 - protein, 116 aa, Homo sapiens
QVQLQESGPGLIKPSGTLSLTCAVSGGSISSNTWWSWVRQPPGKGLEWIGEIYHSGSTMYNPSLKSRVTISVDKSKNQFSLKLNSVTAADTAVYYCTGEGHNWNYWGQGTLVTVSS

SEQ ID NO: 139 - protein, 9 aa, Homo sapiens
GGSISSNTW

SEQ ID NO: 140 - protein, 7 aa, Homo sapiens
IYHSGST

SEQ ID NO: 141 - protein, 9 aa, Homo sapiens
TGEGHNWNY

SEQ ID NO: 142 - DNA, 336 bp, Homo sapiens
gatgttgtgttgactcagtctccactctccctgcccgtcacccttggacagccggcctccatctcctgcaggtctagtcaaagcctcgtatacactgatggaaacacctacttgagttggtttcagcagaggccaggccaatctccaaggcgcctaatttataaggtttctaactgggaatctggggtcccagacagattcagcggcagtgggtcaggcactgatttcacactgaaaatcagcagggtggaggctgaagatgttgggatttattactgcatgcaaggtacacactggccgctcactttcggcggagggaccaaggtggagatcaaa

SEQ ID NO: 143 - protein, 112 aa, Homo sapiens
DVVLTQSPLSLPVTLGQPASISCRSSQSLVYTDGNTYLSWFQQRPGQSPRRLIYKVSNWESGVPDRFSGSGSGTDFTLKISRVEAEDVGIYYCMQGTHWPLTFGGGTKVEIK

SEQ ID NO: 144 - protein, 11 aa, Homo sapiens
QSLVYTDGNTY

SEQ ID NO: 145 - DNA, 366 bp, Homo sapiens
gaagtgcagctggtggagtctgggggaggcttggtacagcctggcaggtccctgagactctcctgtgcagcctctggattcacctttgatgattatgccatgcactgggtccggcaagctccagggaagggcctggagtgggtctcaggtattagttggaatagtggtagcataggttatgcggactctgtgaagggccgattcaccatctccagagacaacgccaagaactccctgtatctgcaaatgaacagtctgagagttgaggacacggccttgtattactgtgcaaaagatctccagggggactactactactacggtgtggacgtctggggccaagggaccacggtcaccgtctcctca

SEQ ID NO: 146 - protein, 122 aa, Homo sapiens
EVQLVESGGGLVQPGRSLRLSCAASGFTFDDYAMHWVRQAPGKGLEWVSGISWNSGSIGYADSVKGRFTISRDNAKNSLYLQMNSLRVEDTALYYCAKDLQGDYYYYGVDVWGQGTTVTVSS

SEQ ID NO: 147 - protein, 15 aa, Homo sapiens
AKDLQGDYYYYGVDV

SEQ ID NO: 148 - DNA, 321 bp, Homo sapiens
gccatccagttgacccagtctccatcctccctgtctgcatctgtaggagacagagtcaccatcacttgccgggcaagtcagggcattagcagtgctttagcctggtatcagcagaaaccagggaaacctcctaagctcctgatctatgatgcctccagtttggtaagtggggtcccatcaagattcagcggcagtagatctgggacagatttcactctcaccatcagcagcctgcaacctgaggattttgcaacttattactgtcaacagtttattagttacccgctcactttcggcggagggaccagggtggagatcaaa

SEQ ID NO: 149 - protein, 107 aa, Homo sapiens
AIQLTQSPSSLSASVGDRVTITCRASQGISSALAWYQQKPGKPPKLLIYDASSLVSGVPSRFSGSRSGTDFTLTISSLQPEDFATYYCQQFISYPLTFGGGTRVEIK

SEQ ID NO: 150 - DNA, 360 bp, Homo sapiens
caggtgcagctggtggagtctgggggaggcgtggtccagcctgggaggtccctgagactctcctgtgcagcgtctggattcaccttcagtagctatggcatgcactgggtccgccaggctccaggcaaggggctggagtgggtggcagttatatggtatgatggaggtaataaatactatgcagactccgtgaagggccgattcaccatctccagagacaattctaagaacacgctgtatctgcaaatgaacagcctgagagccgaggacacggctgtgtattactgtgcgagagttaatgtactaatgggctacggtatggacgtctggggccaagggaccacggtcaccgtctcctca

SEQ ID NO: 151 - protein, 120 aa, Homo sapiens
QVQLVESGGGVVQPGRSLRLSCAASGFTFSSYGMHWVRQAPGKGLEWVAVIWYDGGNKYYADSVKGRFTISRDNSKNTLYLQMNSLRAEDTAVYYCARVNVLMGYGMDVWGQGTTVTVSS

SEQ ID NO: 152 - protein, 8 aa, Homo sapiens
IWYDGGNK

SEQ ID NO: 153 - protein, 13 aa, Homo sapiens
ARVNVLMGYGMDV

SEQ ID NO: 154 - DNA, 321 bp, Homo sapiens
gaaattgtgttgacgcagtctccaggcaccctgtctttgtctccaggggataaagccaccctctcctgcagggccagtcagagtatcatcagcagcttcttagcctggtaccagcagaaacctggccaggctcccaggctcctcatctatggtgcatccagcagggccactggcatcccagacaggttcagtggcagtgggtctgggacagacttcactctcaccatcagcagactggaacctgaagattttgcagtgtattactgtcagcagtatggtagctcgctcactttcggcggagggaccaaggtggagatcaaa

SEQ ID NO: 155 - protein, 107 aa, Homo sapiens
EIVLTQSPGTLSLSPGDKATLSCRASQSIISSFLAWYQQKPGQAPRLLIYGASSRATGIPDRFSGSGSGTDFTLTISRLEPEDFAVYYCQQYGSSLTFGGGTKVEIK

SEQ ID NO: 156 - protein, 7 aa, Homo sapiens
QSIISSF

SEQ ID NO: 157 - skipped

SEQ ID NO: 158 - protein, 8 aa, Homo sapiens
QQYGSSLT

SEQ ID NO: 159 - DNA, 351 bp, Homo sapiens
gaggtgcagctggtggagtctggaggaggcttgatccagcctggggggtccctgagactctcctgtgcagcctctgggatcaccgtcagtagcaactacatgagctgggtccgccaggctccagggaaggggctggagtgggtctcagttatttatagcggtggtactacaaactacgcagactccgtgaagggccgattcaccatctccagagacaattccaagaacacgctgtatcttcaaatgaacagcctgagagccgaggacacggccgtgtattactgtgcgagagatacggtggtctacggtatggacgtctggggccaagggaccacggtcaccgtctcctca

SEQ ID NO: 160 - protein, 117 aa, Homo sapiens
EVQLVESGGGLIQPGGSLRLSCAASGITVSSNYMSWVRQAPGKGLEWVSVIYSGGTTNYADSVKGRFTISRDNSKNTLYLQMNSLRAEDTAVYYCARDTVVYGMDVWGQGTTVTVSS

SEQ ID NO: 161 - protein, 8 aa, Homo sapiens
GITVSSNY

SEQ ID NO: 162 - DNA, 321 bp, Homo sapiens
gacatccagttgacccagtctccatccttcctgtctgcatctgtaggagacagagtcaccatcacttgctgggccagtcagggcattagcagttatttagcctggtatcagcaaaaaccagggaaagcccctaagctcctgatctatgctgcatccactttgcaaagtggggtcccatcaaggttcagcggcagtggatctgggacagaattcactctcacaatcagcagcctgcagcctgaagattttgcaacttattactgtcaacagcttaatagtcacccgctcactttcggcggagggaccaaggtggagatcaaa

SEQ ID NO: 163 - protein, 107 aa, Homo sapiens
DIQLTQSPSFLSASVGDRVTITCWASQGISSYLAWYQQKPGKAPKLLIYAASTLQSGVPSRFSGSGSGTEFTLTISSLQPEDFATYYCQQLNSHPLTFGGGTKVEIK

SEQ ID NO: 164 - protein, 9 aa, Homo sapiens
QQLNSHPLT

SEQ ID NO: 165 - DNA, 366 bp, Homo sapiens
gaagtgcagctggtggagtctgggggaggcttggtacagcctggcaggtccctgagactctcctgtgcagcctctggattcacctttgatgattatgccatgcactgggtccggcaagctccagggaagggcctggagtgggtctcaggtattagttggaatagtggtagcataggctatgcggactctgtgaagggccgattcaccatctccagagacaacgccaagaactccctgtatctgcaaatgaacagtctgagagctgaggacacggccttgtattactgtgcaaaagatctccagggggacgactactactacggtgtggacgtctggggccaagggaccacggtcaccgtctcctca

SEQ ID NO: 166 - protein, 122 aa, Homo sapiens
EVQLVESGGGLVQPGRSLRLSCAASGFTFDDYAMHWVRQAPGKGLEWVSGISWNSGSIGYADSVKGRFTISRDNAKNSLYLQMNSLRAEDTALYYCAKDLQGDDYYYGVDVWGQGTTVTVSS

SEQ ID NO: 167 - protein, 15 aa, Homo sapiens
AKDLQGDDYYYGVDV

SEQ ID NO: 168 - DNA, 321 bp, Homo sapiens
gccatccagttgacccagtctccatcctccctgtctgcatctgtaggagacagagtcaccatcacttgccgggcaagtcaggacattagcagtgctttagcctggtatcagcagaaaccagggaaagctcctaagctcctgatctatgatgcctccagtttggaaagtggggtcccatcaaggttcagcggcagtagatctgggacagatttcactctcaccatcagcagcctgcaacctgaagattttgcaaattattactgtcaacagtttattagttacccgctcactttcggcggagggaccaaggtggagatcaaa

SEQ ID NO: 169 - protein, 107 aa, Homo sapiens
AIQLTQSPSSLSASVGDRVTITCRASQDISSALAWYQQKPGKAPKLLIYDASSLESGVPSRFSGSRSGTDFTLTISSLQPEDFANYYCQQFISYPLTFGGGTKVEIK

SEQ ID NO: 170 - DNA, 351 bp, Homo sapiens
gaggtgcagctggtggagtctggaggaggcttgatccagccgggggggtccctgagactctcctgtgcagccgctgggttaaccgtcagtagcaactatatgaactgggtccgccaggttccagggaaggggctggagtgggtctcagttatttatagcggtggtagcacatactacgcagactccgtgaagggccgattcaccatctccagagacaattccaagaacacgctgtatcttcaaatgaacagtctgagagccgaggacacggccgtgtattactgtgcgagagatctgggtaccctgggtatggacgtctggggccaagggaccacggtcaccgtctcctca

SEQ ID NO: 171 - protein, 117 aa, Homo sapiens
EVQLVESGGGLIQPGGSLRLSCAAAGLTVSSNYMNWVRQVPGKGLEWVSVIYSGGSTYYADSVKGRFTISRDNSKNTLYLQMNSLRAEDTAVYYCARDLGTLGMDVWGQGTTVTVSS

SEQ ID NO: 172 - protein, 8 aa, Homo sapiens
GLTVSSNY

SEQ ID NO: 173 - protein, 11 aa, Homo sapiens
ARDLGTLGMDV

SEQ ID NO: 174 - DNA, 321 bp, Homo sapiens
gacatccagttgacccagtctccatccttcctgtctgcatctgtaggagacagagtcaccatcacttgctgggccagtcagggcattagcacttatttagcctggtatcagcaaaaaccagggaaagcccctaagctcctgatctatgctgcatccactttgcagagcggggtcccatcaaggttcagcggcagtggatctgggacagaattcactctcacaatcagcagcctgcagcctgaagattttgcaacttattactgtcagcagcttaacagttaccttccgacgttcggccaagggaccaaggtggaaatcaaa

SEQ ID NO: 175 - protein, 107 aa, Homo sapiens
DIQLTQSPSFLSASVGDRVTITCWASQGISTYLAWYQQKPGKAPKLLIYAASTLQSGVPSRFSGSGSGTEFTLTISSLQPEDFATYYCQQLNSYLPTFGQGTKVEIK

SEQ ID NO: 176 - protein, 6 aa, Homo sapiens
QGISTY

SEQ ID NO: 177 - protein, 9 aa, Homo sapiens
QQLNSYLPT

SEQ ID NO: 178 - DNA, 372 bp, Homo sapiens
gaggtgcagctggtggagtctgggggaggcttggtaaagcctggggggtcccttagactctcctgtgcagcctctggattcactttcagtaacgcctggatgagctgggtccgccaggctccagggaaggggctggagtgggttggccgtattaaaaacaaagctgatggtgggacaacagactacgctgcacccgtgaaaggcagattcaccatctcaagagatgattcaaaaaacacgttgtatctgcaaatgaacagcctgaaaaccgaggacacagccgtgtattactgtaccacagaggaattactatggttcggggagtcgccctttgactgctggggccagggaaccctggtcaccgtctcctca

SEQ ID NO: 179 - protein, 124 aa, Homo sapiens
EVQLVESGGGLVKPGGSLRLSCAASGFTFSNAWMSWVRQAPGKGLEWVGRIKNKADGGTTDYAAPVKGRFTISRDDSKNTLYLQMNSLKTEDTAVYYCTTEELLWFGESPFDCWGQGTLVTVSS

SEQ ID NO: 180 - protein, 8 aa, Homo sapiens
GFTFSNAW

SEQ ID NO: 181 - protein, 10 aa, Homo sapiens
IKNKADGGTT

SEQ ID NO: 182 - protein, 15 aa, Homo sapiens
TTEELLWFGESPFDC

SEQ ID NO: 183 - DNA, 321 bp, Homo sapiens
gacatccagttgacccagtctccatccttcctgtctgcatctgtaggagacagagtcaccatcacttgctgggccagtcagggcattaacagttatttagcctggtatcagcaaaaaccagggaaagcccctaagctcctgatctatgctgcatccactttgcaaagtggggtcccatcaaggttcagcggcagtggatctgggacagaattcactctcacaatcagcagcctgcagcctgaagattttacaacttattactgtcaacaatttaatgattaccctcggacgttcggcccagggaccaaggtggaaatcaaa

SEQ ID NO: 184 - protein, 107 aa, Homo sapiens
DIQLTQSPSFLSASVGDRVTITCWASQGINSYLAWYQQKPGKAPKLLIYAASTLQSGVPSRFSGSGSGTEFTLTISSLQPEDFTTYYCQQFNDYPRTFGPGTKVEIK

SEQ ID NO: 185 - protein, 6 aa, Homo sapiens
QGINSY

SEQ ID NO: 186 - protein, 9 aa, Homo sapiens
QQFNDYPRT

SEQ ID NO: 187 - DNA, 366 bp, Homo sapiens
gaagtgcagctggtggagtctgggggaggcttggtacagcctggcaggtccctgagactctcctgtgcagcctctggattcacctttgatgattatgccatgcactgggtccggcaagctccagggaagggcctggagtgggtctcaggtattacttggaatagtggtagcataggttatgcggactctgtgaagggccgattcaccatctccagagacaacgccaagaactccctgtatctgcacatgaacagtctgagagttgaggacacggccttgtattactgtgcaaaagatctccagggggactactactactacggtgtggacgtctggggccaagggaccacggtcaccgtctcctca

SEQ ID NO: 188 - protein, 122 aa, Homo sapiens
EVQLVESGGGLVQPGRSLRLSCAASGFTFDDYAMHWVRQAPGKGLEWVSGITWNSGSIGYADSVKGRFTISRDNAKNSLYLHMNSLRVEDTALYYCAKDLQGDYYYYGVDVWGQGTTVTVSS

SEQ ID NO: 189 - DNA, 321 bp, Homo sapiens
gccatccagttgacccagtctccatcctccctgtctgcatctgtaggagacagagtcaccatcacttgccgggcaagtcagggcattagcagtgctttagcctggtatcagcagaagccagggaaagctcctaaactcctgctctatgatgcctccagtttggtaagtggggtcccatcaagattcagcggcagtagatctgggacagatttcactctcaccatcagcagcctgcaacctgaggattttgcaacttattactgtcaacagtttattagttacccgctcactttcggcggagggaccagggtggagatcaaa

SEQ ID NO: 190 - protein, 107 aa, Homo sapiens
AIQLTQSPSSLSASVGDRVTITCRASQGISSALAWYQQKPGKAPKLLLYDASSLVSGVPSRFSGSRSGTDFTLTISSLQPEDFATYYCQQFISYPLTFGGGTRVEIK

SEQ ID NO: 191 - DNA, 354 bp, Homo sapiens
gaggtgcagctggtgcagtctggagcagaggtgaaaaagcccggggagtctctgaagatctcctgtaagggttctggatacagctttagcagctactggatcggctgggtgcgccagatgcccgggaaaggcctggagtggatggggatcatctatcctggtgactctgaaaccagatacagcccgtccttccaaggccaggtcaccatctcagccgacaagtccatcagcaccgcctacctgcagtggagcagcctgaaggcctcggacaccgccatgtattactgtgcgaggtcgtataactggaactactttgactactggggccagggaaccctggtcaccgtctcctca

SEQ ID NO: 192 - protein, 118 aa, Homo sapiens
EVQLVQSGAEVKKPGESLKISCKGSGYSFSSYWIGWVRQMPGKGLEWMGIIYPGDSETRYSPSFQGQVTISADKSISTAYLQWSSLKASDTAMYYCARSYNWNYFDYWGQGTLVTVSS

SEQ ID NO: 193 - protein, 8 aa, Homo sapiens
GYSFSSYW

SEQ ID NO: 194 - protein, 8 aa, Homo sapiens
IYPGDSET

SEQ ID NO: 195 - DNA, 321 bp, Homo sapiens
gccatccagttgacccagtctccatcctccctgtctgcatctgtaggggacagagtcatcatcacttgccgggcaagtcagggcattagcagtgctttagcctggtatcagcagaaaccagggaaagctcttaaactcctgatctatgatgcctccagtttggaaagtggggtcccatcaaggttcagcggcagtggatctgggacagatttcactctcaccatcaccagcctgcagcctgaagattttgcaacttattactgtcaacagtttagtagttacccttggacgttcggccaagggaccaaggtggaaatcaaa

SEQ ID NO: 196 - protein, 107 aa, Homo sapiens
AIQLTQSPSSLSASVGDRVIITCRASQGISSALAWYQQKPGKALKLLIYDASSLESGVPSRFSGSGSGTDFTLTITSLQPEDFATYYCQQFSSYPWTFGQGTKVEIK

SEQ ID NO: 197 - protein, 9 aa, Homo sapiens
QQFSSYPWT

SEQ ID NO: 198 - DNA, 354 bp, Homo sapiens
gaggtgcagctggtgcagtctggagcagaggtgaaaaagcccggggagtctctgaagatctcctgtaagggttctggatacagctttaccagctactggatcggctgggtgcgccagatgcccgggaaaggcctggagtggatggggatcatctatcctggtgactctgataccagatacagcccgtccttccaaggccaggtcaccatctcagccgacaagtccatcagcaccgcctacctgcagtggagcagcctgaaggcctcggacaccgccatgtattactgtgtgaggtcgtataattggaactactttgactactggggccagggaaccctggtcaccgtctcctca

SEQ ID NO: 199 - protein, 118 aa, Homo sapiens
EVQLVQSGAEVKKPGESLKISCKGSGYSFTSYWIGWVRQMPGKGLEWMGIIYPGDSDTRYSPSFQGQVTISADKSISTAYLQWSSLKASDTAMYYCVRSYNWNYFDYWGQGTLVTVSS

SEQ ID NO: 200 - protein, 11 aa, Homo sapiens
VRSYNWNYFDY

SEQ ID NO: 201 - DNA, 321 bp, Homo sapiens
gccatccagttgacccagtctccatcctccctgtctgcatctgtaggagacagagtcaccatcacttgccgggcaagtcagggcattagcagtggtttagcctggtatcagcagaaagcagggaaagctcctaagctcctgatctatgatgtctccagtttggaaagtggggtcccatcaaggttcagcggcagtggatctgggacagatttcactctcaccatcagcagcctgcagcctgaagattttgcaacttattactgtcaacagtttcttagttacccttggacgttcggccaagggaccaaggtggaaatcaaa

SEQ ID NO: 202 - protein, 107 aa, Homo sapiens
AIQLTQSPSSLSASVGDRVTITCRASQGISSGLAWYQQKAGKAPKLLIYDVSSLESGVPSRFSGSGSGTDFTLTISSLQPEDFATYYCQQFLSYPWTFGQGTKVEIK

SEQ ID NO: 203 - skipped

SEQ ID NO: 204 - protein, 9 aa, Homo sapiens
QQFLSYPWT

SEQ ID NO: 205 - DNA, 348 bp, Homo sapiens
caggtgcagctgcaggagtcgggcccaggactggtgaagccttcggagaccctgtccctcacctgcgctgtctcgggtggctccatcagcagaagtacctggtggagttgggtccgccagcccccagggaaggggctggagtggattggggaaatctctcatagtgggagtaccaaatacaacccgtccctcaagagtcgagtcaccatatcagtagacaagtccaagaaccagttctccctgaagctgagctctgtgaccgccgcggacacggccgtatattactgtgcgggagaggggtctaactggagttactggggccagggaaccctggtcaccgtctcctca

SEQ ID NO: 206 - protein, 116 aa, Homo sapiens
QVQLQESGPGLVKPSETLSLTCAVSGGSISRSTWWSWVRQPPGKGLEWIGEISHSGSTKYNPSLKSRVTISVDKSKNQFSLKLSSVTAADTAVYYCAGEGSNWSYWGQGTLVTVSS

SEQ ID NO: 207 - protein, 9 aa, Homo sapiens
AGEGSNWSY

SEQ ID NO: 208 - DNA, 336 bp, Homo sapiens
gatgttgtgatgactcagtctccacactccctgcccgtcacccttggacagccggcctccatctcctgcaggtctagtcaaagcctcgtatacagtgatggaaacacatatttgagttggtttcagcagaggccaggccaatctccaaggcgcctaatttataaggtttctaaatgggacgctggggtcccagacagattcagcggcagtgggtcaggcactgatttcacactgaaaatcagcagggtggaggctgaggatattgggatttattactgcatgcaaggtacacactggccgctcactttcggcggagggaccaaggtggagctcaaa

SEQ ID NO: 209 - protein, 112 aa, Homo sapiens
DVVMTQSPHSLPVTLGQPASISCRSSQSLVYSDGNTYLSWFQQRPGQSPRRLIYKVSKWDAGVPDRFSGSGSGTDFTLKISRVEAEDIGIYYCMQGTHWPLTFGGGTKVELK

SEQ ID NO: 210 - DNA, 348 bp, Homo sapiens
caggtgcagctgcaggagtcgggcccaggactggtgaagccttcggggaccctgtccctcacctgcgctgtctctggtggctccatcagcagtagtaactggtggagttgggtccgccagcccccagggaaggggctggagtggattggggaaatctatcatagtgggagcaccatgtacaacccgtccctcaagagtcgagtcaccatatcagtagacaagtccaagaaccagttctccctgaagctgagctctgtgaccgccgcggacacggccgtgtattactgtacgggagaggggtataactggaactactggggccagggaaccctggtcaccgtctcctca

SEQ ID NO: 211 - protein, 116 aa, Homo sapiens
QVQLQESGPGLVKPSGTLSLTCAVSGGSISSSNWWSWVRQPPGKGLEWIGEIYHSGSTMYNPSLKSRVTISVDKSKNQFSLKLSSVTAADTAVYYCTGEGYNWNYWGQGTLVTVSS

SEQ ID NO: 212 - protein, 9 aa, Homo sapiens
GGSISSSNW

SEQ ID NO: 213 - DNA, 336 bp, Homo sapiens
gatgttgtgttgactcagtctccactctccctgcccgtcacccttggacagccggcctccatctcctgcaggtctagtcaaagcctcgtatacagtgatggaaacacctacttgagttggtttcaacagaggccaggccaatctccaaggcgcctaatttataaggtttctaactgggactctggggtcccagacagattcagcggcagtgggtcaggctctgatttcacactgaagatcagcagggtggaggctgaggatgttggggtttattactgcatgcaaggtacacactggccgctcactttcggcggagggaccaaggtggagatcaaa

SEQ ID NO: 214 - protein, 112 aa, Homo sapiens
DVVLTQSPLSLPVTLGQPASISCRSSQSLVYSDGNTYLSWFQQRPGQSPRRLIYKVSNWDSGVPDRFSGSGSGSDFTLKISRVEAEDVGVYYCMQGTHWPLTFGGGTKVEIK

SEQ ID NO: 215 - DNA, 348 bp, Homo sapiens
caggtgcagctgcaggagtcgggcccaggactggtgaaaccttcggagaccctgtccctcacctgcgctgtctcgggtggctccatcagcagaagtacctggtggagttgggtccgccagcccccagggaaggggctggagtggattggggaaatctatcatagtgggagcaccaaatacaacccgtccctcaagagtcgagtcaccatatcagtagacaagtccaagaaccagttctccctgaagctgagctctgtgaccgccgcggacacggccgtgtattactgtgcgggagaggggtctaactggagctactggggccagggaaccctggtcaccgtctcctca

SEQ ID NO: 216 - protein, 116 aa, Homo sapiens
QVQLQESGPGLVKPSETLSLTCAVSGGSISRSTWWSWVRQPPGKGLEWIGEIYHSGSTKYNPSLKSRVTISVDKSKNQFSLKLSSVTAADTAVYYCAGEGSNWSYWGQGTLVTVSS

SEQ ID NO: 217 - DNA, 336 bp, Homo sapiens
gatgttgtgatgactcagtctccagtctccctgcccgtcacccttggacagccggcctccatctcctgcaggtctagtcaaagcctcatatacagtgatggaaacacctacttgagttggtttcagcagaggccaggccaatctccaaggcgcctaatttataaggtttctaactgggactctggggtcccagacagattcagcggcagtgggtcaggcactgatttcacactgaaaatcagcagggtggaggctgaggatattgggatttattactgcatgcaaggtacacactggccgctcactttcggcggagggaccaaggtggagctcaaa

SEQ ID NO: 218 - protein, 112 aa, Homo sapiens
DVVMTQSPVSLPVTLGQPASISCRSSQSLIYSDGNTYLSWFQQRPGQSPRRLIYKVSNWDSGVPDRFSGSGSGTDFTLKISRVEAEDIGIYYCMQGTHWPLTFGGGTKVELK

SEQ ID NO: 219 - protein, 11 aa, Homo sapiens
QSLIYSDGNTY

SEQ ID NO: 220 - DNA, 351 bp, Homo sapiens
gaggtgcagctggtggagtctggaggaggcttgatccagcctggggggtccctgagactctcctgtgcagcctctggggtcaccgtcagtagcaactacatgagctgggtccgccaggctccagggaaggggctggagtgggtctcagttatttatagcggtggtagcacattctacgcagactccgtgaagggccgattcaccatctccagagacaattccaagaacacgctgtatcttcaaatgaacagcctgagagccgaggacacggccgtgtattactgtgcgagagatctctcctactacggtatggacgtctggggccaagggaccacggtcaccgtctcctca

SEQ ID NO: 221 - protein, 117 aa, Homo sapiens
EVQLVESGGGLIQPGGSLRLSCAASGVTVSSNYMSWVRQAPGKGLEWVSVIYSGGSTFYADSVKGRFTISRDNSKNTLYLQMNSLRAEDTAVYYCARDLSYYGMDVWGQGTTVTVSS

SEQ ID NO: 222 - protein, 11 aa, Homo sapiens
ARDLSYYGMDV

SEQ ID NO: 223 - DNA, 321 bp, Homo sapiens
gacatccagttgacccagtctccatccttcctgtctgcatctgtaggagacagagtcaccatcacttgctgggccagtcagggcattagcagttatttagcctggtatcagcaaaaaccagggaaagcccctaagctcctgatctatgctgcatccactttgcaaagtggggtcccatcaaaattcagcggcagtggatctgggacagaattcactctcacaatcagcagcctgcagcctgaagattttgcaacttattactgtcaacagcttaatagttacccgtgcagttttggccaggggaccaagctggagatcaaa

SEQ ID NO: 224 - protein, 107 aa, Homo sapiens
DIQLTQSPSFLSASVGDRVTITCWASQGISSYLAWYQQKPGKAPKLLIYAASTLQSGVPSKFSGSGSGTEFTLTISSLQPEDFATYYCQQLNSYPCSFGQGTKLEIK

SEQ ID NO: 225 - protein, 9 aa, Homo sapiens
QQLNSYPCS

SEQ ID NO: 226 - DNA, 348 bp, Homo sapiens
caggtgcagctgcaggagtcgggcccaggactggtgaagccttcggggaccctgtccctcacctgcgctgtctctggtggctccatcagcagtaataagtggtggagttgggtccgccagcccccagggaagggtctggagtggattggggaaatcgatcatagtgggagcaccatgtacaacccgtccctcaagagccgagtcaccatatcagtagacaagtccaagaaccagttctccctgaagctgaactctgtgaccgccgcggacacggccgtgtattactgtacgggagaggggtataactggaactactggggccaggggacccgggtcaccgtctcctca

SEQ ID NO: 227 - protein, 116 aa, Homo sapiens
QVQLQESGPGLVKPSGTLSLTCAVSGGSISSNKWWSWVRQPPGKGLEWIGEIDHSGSTMYNPSLKSRVTISVDKSKNQFSLKLNSVTAADTAVYYCTGEGYNWNYWGQGTRVTVSS

SEQ ID NO: 228 - protein, 9 aa, Homo sapiens
GGSISSNKW

SEQ ID NO: 229 - DNA, 336 bp, Homo sapiens
gatgttgtgatgactcagtctccactctccctgcccgtcacccttggacagacggcctccatctcctgcaggtctagtcaaagcctcctatacactgatggaaatacctacttgagttggtttcagcagaggccaggccaatctccaaggcgcctaatttataaggtttctaagtgggaatctggggtcccagacagattcagcggcagtgggtcaggcactgatttcacactgaaaatcagcagggtggaggctgaagatgttgggatttattactgcatgcaaggtacacactggccgctcactttcggcggagggaccaaggtggagatcaaa

SEQ ID NO: 230 - protein, 112 aa, Homo sapiens
DVVMTQSPLSLPVTLGQTASISCRSSQSLLYTDGNTYLSWFQQRPGQSPRRLIYKVSKWESGVPDRFSGSGSGTDFTLKISRVEAEDVGIYYCMQGTHWPLTFGGGTKVEIK

SEQ ID NO: 231 - DNA, 336 bp, Homo sapiens
gatgttgtgctgactcagtctccactctccctgcccgtcacccttggacagacggcctccatctcctgcaggtctagtcaaagcctcgtatacactgatggaaatacctacttgagttggtttcagcagaggccaggccaatctccaaggcgcctaatttataaggtttctaagtgggaatctggggtcccagacagattcagcggcagtgggtcaggcactgatttcaccctgaaaatcagcagggtggaggctgaagatgttgggatttattactgcatgcaaggtacacactggccgctcactttcggcggagggaccatggtggagatcaca

SEQ ID NO: 232 - protein, 112 aa, Homo sapiens
DVVLTQSPLSLPVTLGQTASISCRSSQSLVYTDGNTYLSWFQQRPGQSPRRLIYKVSKWESGVPDRFSGSGSGTDFTLKISRVEAEDVGIYYCMQGTHWPLTFGGGTMVEIT

SEQ ID NO: 233 - DNA, 381 bp, Homo sapiens
caggtgcagctggtgcagtctggggctgaggtgaagaagcctggggcctcagtgaaggtctcctgcaaggcttctggatacaccttcaccagttatgatatcaactgggtgcgacaggccactggacaagggcttgagtggatgggatggatgaaccctaacagtggtaacacaggctatgcacagaagttccagggcagagtcaccatgaccagaaacacctccataagcacagcctacatggagctgagcagcctgagatctgaggacacggccgtgtatttctgtgcgagaggcgggcgatattgtagtgatgttagctgctactccggagagccttttgactactggggccagggaaccctggtcaccgtctcctca

SEQ ID NO: 234 - protein, 127 aa, Homo sapiens
QVQLVQSGAEVKKPGASVKVSCKASGYTFTSYDINWVRQATGQGLEWMGWMNPNSGNTGYAQKFQGRVTMTRNTSISTAYMELSSLRSEDTAVYFCARGGRYCSDVSCYSGEPFDYWGQGTLVTVSS

SEQ ID NO: 235 - protein, 8 aa, Homo sapiens
MNPNSGNT

SEQ ID NO: 236 - protein, 20 aa, Homo sapiens
ARGGRYCSDVSCYSGEPFDY

SEQ ID NO: 237 - DNA, 321 bp, Homo sapiens
gaaattgtgctgactcagtctccagactttcagtctgtgactccaaaggagaaagtcaccatcacctgccgggccagtcagagcattggtagtagcttacactggttccagcagaaaccagatcagtctccaaagctcctcatcaagtatacttcccagtccatctcaggggtcccctcgaggttcagtggcagtggatctgggacagatttcaccctcaccatcaatagcctggaagctgaagatgctgcagcgtattattgtcatcagagtagtagtttacctcacactttcggccctgggaccaaagtggagatcaaa

SEQ ID NO: 238 - protein, 107 aa, Homo sapiens
EIVLTQSPDFQSVTPKEKVTITCRASQSIGSSLHWFQQKPDQSPKLLIKYTSQSISGVPSRFSGSGSGTDFTLTINSLEAEDAAAYYCHQSSSLPHTFGPGTKVEIK

SEQ ID NO: 239 - skipped

SEQ ID NO: 240 - DNA, 351 bp, Homo sapiens
gaggtgcagctggtggagtctggaggaggcttgatccagcctggggggtccctgagactctcctgtgcagcctctggggtcaccgtcagtagcaactatatgaactgggtccgccaggctccagggaaggggctggagtgggtctcagttatttatagcggtggtagcacatactacgcagactccgtgaagggccgattcaccatctccagagacaattccaagaacacgctgtttcttcaaatgaacagcctgagagccgaggactcggccgtgtattactgtgcgagagatttgggaccctacggtgtggacgtctggggccaagggaccacggtcaccgtctcctca

SEQ ID NO: 241 - protein, 117 aa, Homo sapiens
EVQLVESGGGLIQPGGSLRLSCAASGVTVSSNYMNWVRQAPGKGLEWVSVIYSGGSTYYADSVKGRFTISRDNSKNTLFLQMNSLRAEDSAVYYCARDLGPYGVDVWGQGTTVTVSS

SEQ ID NO: 242 - DNA, 354 bp, Homo sapiens
gaggtgcagctggtgcagtctggagtagaggtgaaaaagcccggggagtctctgaagatctcctgtaagggttctggatacagctttaccagctactggatcggctgggtgcgccagatgcccgggaaaggcctggagtggatggggatcatctatcctggtgactctgataccagatacagcccgtccttccaaggccaggtcaccatctcagccgacaagtccatcagtaccgcctacctgcagtggagcagcctgaaggcctcggacaccgccatgtattactgtgcgaggtcgtataactggaactactttgactactggggccagggaaccctggtcaccgtctcctca

SEQ ID NO: 243 - protein, 118 aa, Homo sapiens
EVQLVQSGVEVKKPGESLKISCKGSGYSFTSYWIGWVRQMPGKGLEWMGIIYPGDSDTRYSPSFQGQVTISADKSISTAYLQWSSLKASDTAMYYCARSYNWNYFDYWGQGTLVTVSS

SEQ ID NO: 244 - DNA, 321 bp, Homo sapiens
gccatccagttgacccagtctccatcctccctgtctgcatctgtaggagacagagtcaccatcacttgccgggcaagtcagggcattagcagtggtttagcctggtatcagcagaaaccagggaaagctcctgagctcctgatctatgatgcctccagtttggaaagtggggtcccatcaaggttcagcggcagtggatctgggacagatttcactctcaccatcagcagcctgcagcctgaagattttgcaacttattactgtcaacagttttatagttacccttggacgttcggccaagggaccaaggtggaaatcaaa

SEQ ID NO: 245 - protein, 107 aa, Homo sapiens
AIQLTQSPSSLSASVGDRVTITCRASQGISSGLAWYQQKPGKAPELLIYDASSLESGVPSRFSGSGSGTDFTLTISSLQPEDFATYYCQQFYSYPWTFGQGTKVEIK

SEQ ID NO: 246 - protein, 9 aa, Homo sapiens
QQFYSYPWT

SEQ ID NO: 247 - DNA, 372 bp, Homo sapiens
cagctgcagctgcaggagtcgggcccaggactggtgaagccttcggagaccctgtccctcacctgcactgtctctggtggctccatcagtaatagtaattactactggggctggatccgccagcccccagggaaggggctggagtggattgggagtatctattatagtgggagaacctactacaacccgtccctcaagagtcgagtcaccatatccgtagacacgtccaagaaccagttctccctgaagttgagctctgtgaccgccgcagacacggctgtgtattactgtgcgagaatgggattactatggttcggggagttctacggtatggacgtctggggccaagggaccacggtcaccgtctcctca

SEQ ID NO: 248 - protein, 124 aa, Homo sapiens
QLQLQESGPGLVKPSETLSLTCTVSGGSISNSNYYWGWIRQPPGKGLEWIGSIYYSGRTYYNPSLKSRVTISVDTSKNQFSLKLSSVTAADTAVYYCARMGLLWFGEFYGMDVWGQGTTVTVSS

SEQ ID NO: 249 - protein, 10 aa, Homo sapiens
GGSISNSNYY

SEQ ID NO: 250 - protein, 7 aa, Homo sapiens
IYYSGRT

SEQ ID NO: 251 - protein, 16 aa, Homo sapiens
ARMGLLWFGEFYGMDV

SEQ ID NO: 252 - DNA, 321 bp, Homo sapiens
gacatccagatgacccagtctccatcctcactgtctgcatctgtaggagacagagtcaccatcacttgtcgggcgagtcagggtattagcagctggttagcctggtatcagcagaaaccagagaaagcccctaagtccctgatctatgatgcatccagtttacaaagaggggtcccatcaaggttcagcggcagtggatctgggacagatttcactctcaccatcagcagcctgcagcctgaagattttgcatcttattactgccaacagtataatagttacccgctcactttcggcggagggaccagggtggagatcaaa

SEQ ID NO: 253 - protein, 107 aa, Homo sapiens
DIQMTQSPSSLSASVGDRVTITCRASQGISSWLAWYQQKPEKAPKSLIYDASSLQRGVPSRFSGSGSGTDFTLTISSLQPEDFASYYCQQYNSYPLTFGGGTRVEIK

SEQ ID NO: 254 - protein, 6 aa, Homo sapiens
QGISSW

SEQ ID NO: 255 - protein, 9 aa, Homo sapiens
QQYNSYPLT

SEQ ID NO: 256 - DNA, 357 bp, Homo sapiens
gaggtgcaactggtggagtctggaggaggcttgatccagcctggggggtccctgagactctcctgtgcagcctctgggctcaccgtcagtagcaactacatgagctgggtccgccaggctccagggaaggggctggagtgggtctcaattatttatagcggtggtagcacatactacgcagactccgtgaagggccgattcaccatctccagagacaattccaagaacacgctgtatcttcaaatgaacagcctgagagccgaggacacggccgtgtattactgtgcgaggctaggggggtactactactacggtatggacgtctggggccaagggaccacggtcaccgtctcctca

SEQ ID NO: 257 - protein, 119 aa, Homo sapiens
EVQLVESGGGLIQPGGSLRLSCAASGLTVSSNYMSWVRQAPGKGLEWVSIIYSGGSTYYADSVKGRFTISRDNSKNTLYLQMNSLRAEDTAVYYCARLGGYYYYGMDVWGQGTTVTVSS

SEQ ID NO: 258 - protein, 13 aa, Homo sapiens
ARLGGYYYYGMDV

SEQ ID NO: 259 - DNA, 321 bp, Homo sapiens
gacatccagatgacccagtctccatcctccctgtctgcatctgtaggagaaagagtcaccatcacttgccaggcgagtcaggacattagaaactatttaaattggtatcagaagaaaccagggaaagcccctaagctcctgatctacgattcatccaatttggaaacaggggtcccatcaaggttcagtggaagtggatctgggacagattttactttcaccatcagcagcctgcagcctgaagatattgcaacatattactgtcaacagtatgataatctcccgatcaccttcggccaagggacacgactggagattaaa

SEQ ID NO: 260 - protein, 107 aa, Homo sapiens
DIQMTQSPSSLSASVGERVTITCQASQDIRNYLNWYQKKPGKAPKLLIYDSSNLETGVPSRFSGSGSGTDFTFTISSLQPEDIATYYCQQYDNLPITFGQGTRLEIK

SEQ ID NO: 261 - protein, 6 aa, Homo sapiens
QDIRNY

SEQ ID NO: 262 - skipped

SEQ ID NO: 263 - protein, 9 aa, Homo sapiens
QQYDNLPIT

SEQ ID NO: 264 - DNA, 354 bp, Homo sapiens
gaggtgcagctggtgcagtctggagcagaggtgaaaaagcccggggagtctctgaagatctcctgtaagggttctggatacagctttaccagctactggatcggctgggtgcgccagatgcccgggaaaggcctggagtggatggggatcatctatcctggtgactctgataccagatacagcccgtccttccaaggccaggtcaccatctcagccgacaagtccatcagcaccgcctacctgcagtggagcagcctgaaggcctcggacaccgccatgtattactgtgcgaggtcgtataactggaactactttgactactggggccagggaaccctggtcaccgtctcctca

SEQ ID NO: 265 - protein, 118 aa, Homo sapiens
EVQLVQSGAEVKKPGESLKISCKGSGYSFTSYWIGWVRQMPGKGLEWMGIIYPGDSDTRYSPSFQGQVTISADKSISTAYLQWSSLKASDTAMYYCARSYNWNYFDYWGQGTLVTVSS

SEQ ID NO: 266 - DNA, 321 bp, Homo sapiens
gccatccagttgacccagtctccatcctccctgtctgcatctgttggagacagagtcaccatcacttgccgggcaagtcagggcattagtagtggtttagcctggtatcagcagaaaccagggaaagctcctaagctcctgatctatgatgtctccagtttggaaagtggggtcccatcaaggttcagcggcagtggatctgggacagatttcactctcaccatcagcagcctgcagcctgaagattttgcaacttattactgtcaacagtttcttagttacccttggacgttcggccaagggaccaaggtggaaatcaaa

SEQ ID NO: 267 - protein, 107 aa, Homo sapiens
AIQLTQSPSSLSASVGDRVTITCRASQGISSGLAWYQQKPGKAPKLLIYDVSSLESGVPSRFSGSGSGTDFTLTISSLQPEDFATYYCQQFLSYPWTFGQGTKVEIK

SEQ ID NO: 268 - DNA, 351 bp, Homo sapiens
gaggtgcagctggtggagtctggaggaggcttgatccagcctggggggtccctgagactctcctgtgcagcctctggggtcaccgtcagtagcaactacatgagctgggtccgccaggctccagggaaggggctggagggggtctcagttatttatagtggtggtagcacatactacgcagactccgtgaagggccgattcaccatctccagagacaattccaagaacacgctgtatcttcaaatgaacagcctgagagccgaggacacggccgtgtattactgtgcgagagatacggtggtctacggtatggacgtctggggccaagggaccacggtcaccgtctcctca

SEQ ID NO: 269 - protein, 117 aa, Homo sapiens
EVQLVESGGGLIQPGGSLRLSCAASGVTVSSNYMSWVRQAPGKGLEGVSVIYSGGSTYYADSVKGRFTISRDNSKNTLYLQMNSLRAEDTAVYYCARDTVVYGMDVWGQGTTVTVSS

SEQ ID NO: 270 - DNA, 321 bp, Homo sapiens
gacatccagttgacccagtctccatccttcctgtctgcatctgtaggagacagagtcaccatcacttgctgggccagtcagggcattagcagttatttagcctggtatcagcaaaaaccagggaaagcccctaagctcctgatctatgctgcatccactttgcaaagtggggtcccatcaaggttcagcggcagtggatctgggacagaattcactctcacaatcagcagcctgcagcctgaagattttgcaacttattactgtcaacagcttaatagttacccgctcactttcggcggagggaccaaggtggagatcaaa

SEQ ID NO: 271 - protein, 107 aa, Homo sapiens
DIQLTQSPSFLSASVGDRVTITCWASQGISSYLAWYQQKPGKAPKLLIYAASTLQSGVPSRFSGSGSGTEFTLTISSLQPEDFATYYCQQLNSYPLTFGGGTKVEIK

SEQ ID NO: 272 - DNA, 363 bp, Homo sapiens
caggtgcagctgcaggagtcgggcccaggactggtgaagccttcacagaccctgtccctcacctgcactgtctctggtggctccatcagcagttatggttactactggaactggatccgccagcacccagggaagggcctggagtggattgggtacatctattacagtgggagcacctactacaacccgtccctcaagagtcgagttaccatatcagtagacacgtctaagaaccagctctccctgaggctgaactctgtcagtgccgcggacacggccgtgtattactgtgcgagagacttcggtggtaactcgaactactttgactactggggccagggaaccctggtcaccgtctcctca

SEQ ID NO: 273 - protein, 121 aa, Homo sapiens
QVQLQESGPGLVKPSQTLSLTCTVSGGSISSYGYYWNWIRQHPGKGLEWIGYIYYSGSTYYNPSLKSRVTISVDTSKNQLSLRLNSVSAADTAVYYCARDFGGNSNYFDYWGQGTLVTVSS

SEQ ID NO: 274 - DNA, 321 bp, Homo sapiens
gccatccagttgacccagtctccatcctccctgtctgcatctgtaggagacagagtcaccatcacttgccggacaagtcagggcattagcagtgctttagcctggtatcaacagaaaccagggaaagctcctaaactcctgatctatgatgcctccagtttggaaagtggggtcccatcaaggttcagcggcagtggatctgggacagatttcactctcaccatcagcagcctgcagcctgaagattttgcaacttattactgtcaacagtttaatagttaccctctcactttcggcggagggaccaaggtggagatcaaa

SEQ ID NO: 275 - protein, 107 aa, Homo sapiens
AIQLTQSPSSLSASVGDRVTITCRTSQGISSALAWYQQKPGKAPKLLIYDASSLESGVPSRFSGSGSGTDFTLTISSLQPEDFATYYCQQFNSYPLTFGGGTKVEIK

SEQ ID NO: 276 - DNA, 321 bp, Homo sapiens
gccatccagttgacccagtctccatcctccctgtctgcatctgtaggagacagagtcaccatcacttgccgggcaagtcagggcattagcagtggtttagcctggtatcagcagaaaccagggaaagctcctaaactcctgatctatgatgcctccagtttggaaagtggggtcccatcaaggttcagcggcagtggatctgggacagatttcactctcaccatcagcagcctgcagcctgaagattttgcaatttattactgtcaacagtttaatagttatccttggacgttcggccaagggaccaaggtggaaatcaaa

SEQ ID NO: 277 - protein, 107 aa, Homo sapiens
AIQLTQSPSSLSASVGDRVTITCRASQGISSGLAWYQQKPGKAPKLLIYDASSLESGVPSRFSGSGSGTDFTLTISSLQPEDFAIYYCQQFNSYPWTFGQGTKVEIK

SEQ ID NO: 278 - DNA, 363 bp, Homo sapiens
caggtgcagctgcaggagtcgggcccaggactggtgaagccttcacagaccctgtccctcacctgcactgtctctggtggctccatcagcagttatggttactactggagctggatccgccagcacccagggaagggcctggagtggattggatacatctattacagtgggagcacctactacaacccgtccctcaagagtcgagttaccatgtcagttgacacgtctaagaaccagctctccctgaggctgaactctgtcagtgccgcggacacggccgtgtattactgtgcgagagacttcggtggtaactcgaactactttgactactggggccagggaaccctggtcaccgtctcctca

SEQ ID NO: 279 - protein, 121 aa, Homo sapiens
QVQLQESGPGLVKPSQTLSLTCTVSGGSISSYGYYWSWIRQHPGKGLEWIGYIYYSGSTYYNPSLKSRVTMSVDTSKNQLSLRLNSVSAADTAVYYCARDFGGNSNYFDYWGQGTLVTVSS

SEQ ID NO: 280 - DNA, 321 bp, Homo sapiens
gccatccagttgacccagtctccatcctccctgtctgcatctgtaggagacagagtcaccatcacttgccgggcaagtcagggcattagcagtgctttagcctggtatcagcagaaaccagggaaagctcctaacctcctgatctatgatgcctccagtttggaaagtggggtcccatcaaggttcagcggcagtggatctgggacagatttcactctcaccatcagcagcctgcagcctgaagattttgcaacttattactgtcaacagtttaatagttcccctctcactttcggcggagggaccaaggtggagatcaaa

SEQ ID NO: 281 - protein, 107 aa, Homo sapiens
AIQLTQSPSSLSASVGDRVTITCRASQGISSALAWYQQKPGKAPNLLIYDASSLESGVPSRFSGSGSGTDFTLTISSLQPEDFATYYCQQFNSSPLTFGGGTKVEIK

SEQ ID NO: 282 - protein, 9 aa, Homo sapiens
QQFNSSPLT

SEQ ID NO: 283 - DNA, 381 bp, Homo sapiens
caggtgcagctggtgcagtctggggctgaggtgaagaagcctggggcctcagtgaaggtctcctgcaaggcttctggatacaccttcaccagttatgatatcaactgggtgcgacaggccactggacaagggcttgagtggatgggatggatgaaccctaacagtggtaacacaggctatgcacagaagttccagggcagagtcaccatgaccagagacacctccataaacacagcctacatggagctgagcagcctgagatctgaggacacggccgtgtatttctgtgcgagaggcgggcgatattgtagtgatgttacctgctactccggagagccttttgactactggggccagggaaccctggtcaccgtctcctca

SEQ ID NO: 284 - protein, 127 aa, Homo sapiens
QVQLVQSGAEVKKPGASVKVSCKASGYTFTSYDINWVRQATGQGLEWMGWMNPNSGNTGYAQKFQGRVTMTRDTSINTAYMELSSLRSEDTAVYFCARGGRYCSDVTCYSGEPFDYWGQGTLVTVSS

SEQ ID NO: 285 - protein, 20 aa, Homo sapiens
ARGGRYCSDVTCYSGEPFDY

SEQ ID NO: 286 - DNA, 321 bp, Homo sapiens
gaaattatgctgactcagtctccagactttcagtctgtgactccaaaggagaaagtcaccatcacctgccgggccagtcagagcattggtagtagcttacactggtaccagcagaaaccagatcagtctccaaaactcctcatcaagtttgcttcccagtccatctcaggggtcccctcgaggttcagtggcagtggatctgggacagatttcaccctcaccatcaatagcctggaagctgaagatgctgcagcgtattattgtcatcagagtagtagtttacctcacactttcggccctgggaccaaagtggagatcaaa

SEQ ID NO: 287 - protein, 107 aa, Homo sapiens
EIMLTQSPDFQSVTPKEKVTITCRASQSIGSSLHWYQQKPDQSPKLLIKFASQSISGVPSRFSGSGSGTDFTLTINSLEAEDAAAYYCHQSSSLPHTFGPGTKVEIK

SEQ ID NO: 288 - skipped

SEQ ID NO: 289 - DNA, 321 bp, Homo sapiens
gccatccagttgacccagtctccatcctccctgtctgcatctgtaggagacagagtcaccatcacttgccgggcaagtcagggcattagcagtggtttagcctggtatcagcagaaaccagggaaagctcctaagctcctgatctatgatgtctccagtttggaaagtggggtcccatcaaggttcagcggcagtggatctgggacagatttcactctcaccatcagcagcctgcagcctgaagattttgcaacttattactgtcaacagtttcttagttacccttggacgttcggccaagggaccaaggtggaaatcaaa

SEQ ID NO: 290 - DNA, 357 bp, Homo sapiens
gaggtgcaactggtggagtctggaggaggcttgatccagcctggggggtccctgagactctcctgtgcagcctctgggctcaccgtcagtagcaactacatgagctgggtccgccaggctccagggaaggggctggagtgggtctcaattatttatagcggtggtagcacatactatgcagactccgtgaagggccgattcaccatctccagagacaattccaagaacacgctgtatcttcaaatgaacagcctgagagccgaggacacggccgtgtattactgtgcgaggctaggggggtactactactacggtatggacgtctggggccaagggaccacggtcaccgtctcctca

SEQ ID NO: 291 - DNA, 321 bp, Homo sapiens
gacatccagatgacccagtctccatcctccctgtctgcatctgtaggagaaagagtcaccatcacttgccaggcgagtcaggacattagaaactatttaaattggtatcagaagaaaccagggaaagcccctaaactcctgatctacgattcatccaatttggaaacaggggtcccatcaaggttcagtggaggtggatctgggacagattttactttcaccatcagcagcctgcagcctgaagatattgcaacatattactgtcaacagtatgataatctcccgatcaccttcggccaagggacacgactggagattaaa

SEQ ID NO: 292 - protein, 107 aa, Homo sapiens
DIQMTQSPSSLSASVGERVTITCQASQDIRNYLNWYQKKPGKAPKLLIYDSSNLETGVPSRFSGGGSGTDFTFTISSLQPEDIATYYCQQYDNLPITFGQGTRLEIK

SEQ ID NO: 293 - DNA, 366 bp, Homo sapiens
gaagtgcagctggtggagtctgggggagacttggtacagcctggcaggtccctgagactctcctgtgcagcctctggattcacctttgatgattatgccatgcactgggtccggcaagctccagggaagggcctggagtgggtctcaggtattagttggaatagtggtagcataggctatgcggactctgtgaagggccgattcaccatctccagagacaacgccaagaactccctgtatctgcaaatgaacagtctgagagctgaggacacggccttgtattactgtgcaaaagatctccagggggactactactactacggtgtggacgtctggggccaagggaccacggtcaccgtctcctca

SEQ ID NO: 294 - protein, 122 aa, Homo sapiens
EVQLVESGGDLVQPGRSLRLSCAASGFTFDDYAMHWVRQAPGKGLEWVSGISWNSGSIGYADSVKGRFTISRDNAKNSLYLQMNSLRAEDTALYYCAKDLQGDYYYYGVDVWGQGTTVTVSS

SEQ ID NO: 295 - DNA, 321 bp, Homo sapiens
gccatccagttgacccagtctccatcctccctgtctgcatctgtaggagacagagtcaccatcacttgccgggcaagtcagggcattagcagtgctttagcctggtatcagcagaaatcaggaaaagctcctaagctcctgatctatgatgcctccagtttgggaagtggggtcccatcaaggttcagcggcagtagatctgggacagatttcactctcaccatcagcagcctgcaacctgaagattttgcaacttattactgtcaacagtttattagttacccgctcactttcggcggagggaccaaggtggagatcaaa

SEQ ID NO: 296 - protein, 107 aa, Homo sapiens
AIQLTQSPSSLSASVGDRVTITCRASQGISSALAWYQQKSGKAPKLLIYDASSLGSGVPSRFSGSRSGTDFTLTISSLQPEDFATYYCQQFISYPLTFGGGTKVEIK

SEQ ID NO: 297 - DNA, 351 bp, Homo sapiens
gaggtgcagctggtggagtctggaggaggcttgatccagcctggggggtccctgagactctcctgtgcagcctctgggttcaccgtcagtagcaactacatgagctgggtccgccaggctccagggaaggggctggagtgggtctcagttatttatagcggtggtagcacatactacgcagactccgtgaagggccgattcaccatctccagagacaattccaagaacacgctgtatcttcaaatgaacagcctgagagccgaggacacggccgtgtattactgtgcgagagactacggtgacctatactttgactactggggccagggaaccctggtcaccgtctcctca

SEQ ID NO: 298 - protein, 117 aa, Homo sapiens
EVQLVESGGGLIQPGGSLRLSCAASGFTVSSNYMSWVRQAPGKGLEWVSVIYSGGSTYYADSVKGRFTISRDNSKNTLYLQMNSLRAEDTAVYYCARDYGDLYFDYWGQGTLVTVSS

SEQ ID NO: 299 - protein, 11 aa, Homo sapiens
ARDYGDLYFDY

SEQ ID NO: 300 - DNA, 321 bp, Homo sapiens
gaaattgtgttgacgcagtctccaggcaccctgtctttgtctccaggggaaagagccaccctctcctgcagggccagtcagagtattagcagctacttagcctggtaccagcagaaacctggccaggctcccaggctcctcatctatggtgcatccagcagggccactggcatcccagacaaattcagtggcagtgggtctgggacagacttcactctcaccatcagcagactggagcctgaagattttgcagtgtattactgtcagcagtatggtagctcacctcggacgttcggccaagggaccaaggtggaaatcaaa

SEQ ID NO: 301 - protein, 107 aa, Homo sapiens
EIVLTQSPGTLSLSPGERATLSCRASQSISSYLAWYQQKPGQAPRLLIYGASSRATGIPDKFSGSGSGTDFTLTISRLEPEDFAVYYCQQYGSSPRTFGQGTKVEIK

SEQ ID NO: 302 - protein, 6 aa, Homo sapiens
QSISSY

SEQ ID NO: 303 - protein, 9 aa, Homo sapiens
QQYGSSPRT

SEQ ID NO: 304 - DNA, 363 bp, Homo sapiens
caggtgcagctgcaggagtcgggcccaggactggtgaagccttcacagaccctgtccctcacctgcactgtctctggtgactccatcagccgtggtggtttctactggagctggatccgccagcacccagggaagggcctggagtggattgggtacatctattacagtgggagcacctactacaacccgtccctcaagggtcgagttaccatatcagtagacacgtctaagaaccagttctccctgaagctgacctctgtgactgccgcggacacggccgtgtattactgtgcgagagactacggtggtaactcgaactactttgactactggggccaggggaccctggtcaccgtctcctca

SEQ ID NO: 305 - protein, 121 aa, Homo sapiens
QVQLQESGPGLVKPSQTLSLTCTVSGDSISRGGFYWSWIRQHPGKGLEWIGYIYYSGSTYYNPSLKGRVTISVDTSKNQFSLKLTSVTAADTAVYYCARDYGGNSNYFDYWGQGTLVTVSS

SEQ ID NO: 306 - protein, 10 aa, Homo sapiens
GDSISRGGFY

SEQ ID NO: 307 - protein, 13 aa, Homo sapiens
ARDYGGNSNYFDY

SEQ ID NO: 308 - DNA, 321 bp, Homo sapiens
gccatccagttgacccagtctccatcctccctgtctgcatctgtaggagacagagtcaccatcacttgccgggcaagtcagggcattagcagtgctttagcctggtatcagcagaaaccagggaaagctcctaagctcctgatctatgatgcctccagtttggaaagtggggtcccatcaaggttcagcggcagtggatctgggacagatttcactctcaccatcagcagcctgcagcctgaagattttgcaccttattactgtcaacagtttaatagttaccctctcactttcggcggagggaccaaggtggagatcagg

SEQ ID NO: 309 - protein, 107 aa, Homo sapiens
AIQLTQSPSSLSASVGDRVTITCRASQGISSALAWYQQKPGKAPKLLIYDASSLESGVPSRFSGSGSGTDFTLTISSLQPEDFAPYYCQQFNSYPLTFGGGTKVEIR

SEQ ID NO: 310 - DNA, 321 bp, Homo sapiens
gccatccagttgacccagtctccatcctccctgtctgcatctgtaggagacagagtcaccatcacttgccgggcaagtcagggcattaacaatggtttagcctggtatcagcagaaaccagggaaagctcctaagctcctgatctatgatgtctccagtttggaaagtggggtcccatcaaggttcagcggcagtggatctgggagagattccactctcaccatcagcagtctgcagtctgaagattttgcaacttattactgtcaacagtttaaaagttacccttggacgttcggccaagggaccaaggtggaaatcaaa

SEQ ID NO: 311 - protein, 107 aa, Homo sapiens
AIQLTQSPSSLSASVGDRVTITCRASQGINNGLAWYQQKPGKAPKLLIYDVSSLESGVPSRFSGSGSGRDSTLTISSLQSEDFATYYCQQFKSYPWTFGQGTKVEIK

SEQ ID NO: 312 - protein, 6 aa, Homo sapiens
QGINNG

SEQ ID NO: 313 - DNA, 321 bp, Homo sapiens
gccatccagttgacccagtctccatcctccctgtctgcatctgtaggagacagagtcaccatcacttgccgggcaagtcagggcattagcagtggtttagcctggtatcagcagaaaccagggaaagctcctaagctcctgatctatgatgcctccagtttggaaagtggggtcccatcaaggttcagcggcagtggatctgggacagatttcactctcaccatcagcaacctgcagcctgaagattttgcaacttattactgtcaacagtttaatagttacccttggacgttcggccaagggaccaaggtggaaatcaaa

SEQ ID NO: 314 - protein, 107 aa, Homo sapiens
AIQLTQSPSSLSASVGDRVTITCRASQGISSGLAWYQQKPGKAPKLLIYDASSLESGVPSRFSGSGSGTDFTLTISNLQPEDFATYYCQQFNSYPWTFGQGTKVEIK

SEQ ID NO: 315 - DNA, 348 bp, Homo sapiens
caggtgcagctacaggagtcgggcccaggactggtgaagccttcggggaccctgtccctcacctgcgctgtctctggtggctccatcagcagtaataactggtggagttgggtccgccagcccccagggaagggtctggagtggattggggaaatctatcatagtgggagcaccatgtacaacccgtccctcaagagtcgagtcaccatatcagtagacaagtccaagaaccagttctccctgaagctgaactctgtgaccgccgcggacacggccgtgtattactgtacgggagaggggtctaactggaactactggggccaggggaccctggtcaccgtctcctca

SEQ ID NO: 316 - protein, 116 aa, Homo sapiens
QVQLQESGPGLVKPSGTLSLTCAVSGGSISSNNWWSWVRQPPGKGLEWIGEIYHSGSTMYNPSLKSRVTISVDKSKNQFSLKLNSVTAADTAVYYCTGEGSNWNYWGQGTLVTVSS

SEQ ID NO: 317 - protein, 9 aa, Homo sapiens
TGEGSNWNY

SEQ ID NO: 318 - DNA, 336 bp, Homo sapiens
gatgttgtgatgactcagtctccactctccctgcccgtcacccttggacagccggcctccatctcctgcaggtctagtcaaagcctcgtatatactgatggaaacacctacttgagttggtttcagcagaggccaggccaatctccaaggcgcctactttataaggtttctaactgggactctggggtcccagacagattcagcggcagtgggtcaggcactgatttcacactgaaaatcagcagggtggaggctgaagatgttgggatttattattgcatgcaaggtacacactggccgctcactttcggcggagggaccaaggtggagatcaaa

SEQ ID NO: 319 - protein, 112 aa, Homo sapiens
DVVMTQSPLSLPVTLGQPASISCRSSQSLVYTDGNTYLSWFQQRPGQSPRRLLYKVSNWDSGVPDRFSGSGSGTDFTLKISRVEAEDVGIYYCMQGTHWPLTFGGGTKVEIK

SEQ ID NO: 320 - DNA, 336 bp, Homo sapiens
gatgttgtaatgactcagtctccactctccctgcccgtcacccttggacagccggcctccatctcctgcaggtctagtcaaagcctcgtatacagtgatggaaacacctacttgagttggtttcagcagaggccaggccaatctccaaggcgcctaatttataaggtttctaagtgggactctggggtcccagacagattcagcggcagtgggtcaggcactgatttcacactgaaaatcagcagggtggaggctgaggatgttggggtttattactgcatgcaaggtacacactggccgctcactttcggcggagggaccaaggtggagatcaaa

SEQ ID NO: 321 - protein, 112 aa, Homo sapiens
DVVMTQSPLSLPVTLGQPASISCRSSQSLVYSDGNTYLSWFQQRPGQSPRRLIYKVSKWDSGVPDRFSGSGSGTDFTLKISRVEAEDVGVYYCMQGTHWPLTFGGGTKVEIK

SEQ ID NO: 322 - DNA, 321 bp, Homo sapiens
gccatccagttgacccagtctccatcctccctgtctgcatctgtaggagacagagtcaccatcacttgccgggcaagtcagggcattaacagtggtttagcctggtatcagcagaaaccagggaaaggtcttaagctcctgatctatgatgtctccagtttggaaagtggggtcccatcaaggttcagcggcagtggatctgggagagatttcactctcaccatcagcagcctgcagcctgaagattttgcaacttattactgtcaacagtttaaaagttacccttggacgttcggccaagggaccaaggtggaaatcaaa

SEQ ID NO: 323 - protein, 107 aa, Homo sapiens
AIQLTQSPSSLSASVGDRVTITCRASQGINSGLAWYQQKPGKGLKLLIYDVSSLESGVPSRFSGSGSGRDFTLTISSLQPEDFATYYCQQFKSYPWTFGQGTKVEIK

SEQ ID NO: 324 - protein, 6 aa, Homo sapiens
QGINSG

SEQ ID NO: 325 - DNA, 369 bp, Homo sapiens
gaagtgcagctggtggagtctgggggaggcttggtacagcctggcaggtccctgagactctcctgtgcagcctctggattcacctttgatgattatgccatgcactgggtccggcaaactccagggaagggcctggagtgggtctcaggtattagttggaatagtggtagcataggctatgcggactctgtgaagggccgattcaccatctccagagacaacgccaagaactccctgtatctgcaaatgaacagtctgagagctgaagacacggccttatattactgtacaaaagatttgggactggggattggcttctactacggtttggacgtctggggccaggggaccacggtcaccgtctcctca

SEQ ID NO: 326 - protein, 123 aa, Homo sapiens
EVQLVESGGGLVQPGRSLRLSCAASGFTFDDYAMHWVRQTPGKGLEWVSGISWNSGSIGYADSVKGRFTISRDNAKNSLYLQMNSLRAEDTALYYCTKDLGLGIGFYYGLDVWGQGTTVTVSS

SEQ ID NO: 327 - protein, 16 aa, Homo sapiens
TKDLGLGIGFYYGLDV

SEQ ID NO: 328 - DNA, 321 bp, Homo sapiens
gccatccaaatgacccagtctccatcctccctgtctacatctgtaggagacagagtcaccatcacttgccgggcaagtcagggcattagaaatgatttaggctggtatcagctgaagccagggaaagcccctaagctcctgatctatgatgcatccactttacaaagtggggtcccatcgaggttcagcggcagtggatctggcacagatttcactctcaccatcagcagcctggagcctgaagatttagcaacttattactgtctacatcactacacttacccgtggacgttcggccatgggaccaaggtggaactcaaa

SEQ ID NO: 329 - protein, 107 aa, Homo sapiens
AIQMTQSPSSLSTSVGDRVTITCRASQGIRNDLGWYQLKPGKAPKLLIYDASTLQSGVPSRFSGSGSGTDFTLTISSLEPEDLATYYCLHHYTYPWTFGHGTKVELK

SEQ ID NO: 330 - DNA, 354 bp, Homo sapiens
gaggtgcagctggtgcagtctggagcagaggtgaaaaagcccggggagtctctgaagatctcctgtaagggttttggatacagctttaccagctactggatcggctgggtgcgccagatgcccgggaaaggcctggagtggatggggatcatctatcctggtgactctgataccagatacagcccgtccttccaaggccaggtcaccatctcagccgacaagtccatcagcaccgcctacctgcagtggagcagcctgaaggcctcggacaccgccatgtattactgtgcgaggtcgtataactggaactactttgactactggggccagggaaccctggtcaccgtctcctca

SEQ ID NO: 331 - protein, 118 aa, Homo sapiens
EVQLVQSGAEVKKPGESLKISCKGFGYSFTSYWIGWVRQMPGKGLEWMGIIYPGDSDTRYSPSFQGQVTISADKSISTAYLQWSSLKASDTAMYYCARSYNWNYFDYWGQGTLVTVSS

SEQ ID NO: 332 - DNA, 321 bp, Homo sapiens
gccatccagttgacccagtctccatcctccctgtctgcatctgtaggagacagagtcaccatcacttgccgggcaagtcagggcattagcagtgctttagcctggtatcagcagaaaccagggaaagctcctaagctcctgatctatgatgcctccagtttggaaagtggggtcccatcaaggttcagcggcagtggatctgggacagatttcactctcaccatcagcagcctgcagcctgaggattttgcaacttattactgtcaacagtttaatagttacccttggacgttcggccaagggaccaaggtggaaatcaaa

SEQ ID NO: 333 - protein, 107 aa, Homo sapiens
AIQLTQSPSSLSASVGDRVTITCRASQGISSALAWYQQKPGKAPKLLIYDASSLESGVPSRFSGSGSGTDFTLTISSLQPEDFATYYCQQFNSYPWTFGQGTKVEIK

SEQ ID NO: 334 - DNA, 348 bp, Homo sapiens
caggtgcagctgcaggagtcgggcccaggactggtgaagccttcggggaccctgtccctcacctgcgctgtctcgagtggctccatcagcagaagtacctggtggagttgggtccgccagcccccagggaaggggctggagtggattggggaaatctatcatagtgggagcacccaatacaacccgtccctcaagagtcgagtcaccatatcagtagacaagtccaagaaccagttctccctgaagctgagttctgcgaccgccgcggacacggccgtgtattactgtgcgggagaggggtctaactggaactactggggccagggaaccctggtcaccgtctcctca

SEQ ID NO: 335 - protein, 116 aa, Homo sapiens
QVQLQESGPGLVKPSGTLSLTCAVSSGSISRSTWWSWVRQPPGKGLEWIGEIYHSGSTQYNPSLKSRVTISVDKSKNQFSLKLSSATAADTAVYYCAGEGSNWNYWGQGTLVTVSS

SEQ ID NO: 336 - protein, 9 aa, Homo sapiens
SGSISRSTW

SEQ ID NO: 337 - protein, 9 aa, Homo sapiens
AGEGSNWNY

SEQ ID NO: 338 - DNA, 336 bp, Homo sapiens
gatgttgtgatgactcagtctccactctccctgcccgtcacccttggacagccggcctccatctcctgcaggtctagtcaaagcctcgtatacagtgatggaaacacctacttgagttggtttcagcagaggccaggccaatctccaaggcgcctaatttataaggtttctaactgggactctggggtcccagacagattcagcggcagtgggtcaggcactgatttcacactgagaatcagcagggtggaggctgaggatattggggtttattactgcatgcaaggtacacactggccgctcactttcggcggagggaccaaggtggagctcaaa

SEQ ID NO: 339 - protein, 112 aa, Homo sapiens
DVVMTQSPLSLPVTLGQPASISCRSSQSLVYSDGNTYLSWFQQRPGQSPRRLIYKVSNWDSGVPDRFSGSGSGTDFTLRISRVEAEDIGVYYCMQGTHWPLTFGGGTKVELK

SEQ ID NO: 340 - DNA, 354 bp, Homo sapiens
gaggtgcagctggtgcagtctggagcagaggtgaaaaagcccggggagtctctgaagatctcctgtaagggttctggatacagatttaccagttactggatcggctgggtgcgccagatgcccgggaaaggcctggagtggatggggatcatctatcctggtgactctgataccagatacagcccgtccttccaaggccaggtcaccatctcagccgacaagtccatcagcaccgcctacctgcagtggagcagcctgaaggcctcggacaccgccatgtattactgtgcgaggtcgtataactggaactactttgactactggggccagggaaccctggtcaccgtctcctca

SEQ ID NO: 341 - protein, 118 aa, Homo sapiens
EVQLVQSGAEVKKPGESLKISCKGSGYRFTSYWIGWVRQMPGKGLEWMGIIYPGDSDTRYSPSFQGQVTISADKSISTAYLQWSSLKASDTAMYYCARSYNWNYFDYWGQGTLVTVSS

SEQ ID NO: 342 - protein, 8 aa, Homo sapiens
GYRFTSYW

SEQ ID NO: 343 - DNA, 321 bp, Homo sapiens
gccatccagttgacccagtctccatcctccctgtctgcatctgtaggagacagagtcaccatcacttgccgggcaagtcagggcattagcagtgctttagcctggtatcagcagaaaccagggaaagctcctaagctcctgatctatgatgcctccagtttggaaagtggggtcccaccaaggttcagcggcagtggatctgggacagatttcactctcaccatcagcagcctgcagcctgaagattttgcaacttattactgtcaacagtttattagttacccttggacgttcggccaagggaccaaggtggaaatcaaa

SEQ ID NO: 344 - protein, 107 aa, Homo sapiens
AIQLTQSPSSLSASVGDRVTITCRASQGISSALAWYQQKPGKAPKLLIYDASSLESGVPPRFSGSGSGTDFTLTISSLQPEDFATYYCQQFISYPWTFGQGTKVEIK

SEQ ID NO: 345 - DNA, 321 bp, Homo sapiens
gacatccagttgacccagtctccatccttcctgtctgcatctgtaggagacagagtcaccatcacttgctgggccagtcagggcattagcagttatttagcctggtatcagcaaaaaccagggaaagcccctaagctcctgatctatgctgcatccactttgcaaagtggggtcccatcaaaattcagcggcagtggatctgggacagaattcactctcacaatcagcagcctgcagcctgaagattttgcaacttattactgtcaacagcttaatagttacccgagcagttttggccaggggaccaagctggagatcaaa

SEQ ID NO: 346 - protein, 107 aa, Homo sapiens
DIQLTQSPSFLSASVGDRVTITCWASQGISSYLAWYQQKPGKAPKLLIYAASTLQSGVPSKFSGSGSGTEFTLTISSLQPEDFATYYCQQLNSYPSSFGQGTKLEIK

SEQ ID NO: 347 - protein, 9 aa, Homo sapiens
QQLNSYPSS

SEQ ID NO: 348 - DNA, 351 bp, Homo sapiens
gaggtgcagctggtggagtctggaggaggcttgatccagcctggggggtccctgagactctcctgtgcagcctctgggctcaccgtcagtagcaactacatgaactgggtccgccaggctccagggaaaaaactggagtgggtctcagttatttatagcggaggtagcacattttacgcagactccgtgaggggccgattcaccatctccagagacaattccaagaacacgctgtttcttcaaatgaacagcctgagagccgaggactcggccgtgtattactgtgcgagagatttgggaccctacggtgtggacgtctggggccaagggaccacggtcaccgtctcctca

SEQ ID NO: 349 - protein, 117 aa, Homo sapiens
EVQLVESGGGLIQPGGSLRLSCAASGLTVSSNYMNWVRQAPGKKLEWVSVIYSGGSTFYADSVRGRFTISRDNSKNTLFLQMNSLRAEDSAVYYCARDLGPYGVDVWGQGTTVTVSS

SEQ ID NO: 350 - DNA, 321 bp, Homo sapiens
gacatccagttgacccagtctccatccttcctgtctgcatctgtaggagacagagtcaccatcacttgctgggccagtcagggcattagcagttatttagcctggtatcagcaaaaaccagggaaagcccctaaactcctgatctatgctgcatccactttgcaaagtggggtcccatcaaggttcagcggcagtggatctgggacagaattcactctcacaatcagcagcctgcagcctgaagattttgcaacttattactgtcaacagcttaatagttaccctctcaccttcggccaagggacacgactggagattaaa

SEQ ID NO: 351 - protein, 107 aa, Homo sapiens
DIQLTQSPSFLSASVGDRVTITCWASQGISSYLAWYQQKPGKAPKLLIYAASTLQSGVPSRFSGSGSGTEFTLTISSLQPEDFATYYCQQLNSYPLTFGQGTRLEIK

SEQ ID NO: 352 - DNA, 348 bp, Homo sapiens
gaggtgcagctggtggagtctgggggaggtgtggtacggcctggggggtccctgagactctcctgtgcagcctctggattcacctttgatgattatggcatgagctgggtccgccaagctccagggaaggggctggagtgggtctctggtatttattggaatggtggtagcacaggttatgcagactctgtgaagggccgattcaccatctccagagacaacgccaagaactccctgtatctgcaaatgaacagtctgagagccgaggacacggccttgtattactgtgcgagaggagtgggagctacagactactggggccagggaaccctggtcaccgtctcctca

SEQ ID NO: 353 - protein, 116 aa, Homo sapiens
EVQLVESGGGVVRPGGSLRLSCAASGFTFDDYGMSWVRQAPGKGLEWVSGIYWNGGSTGYADSVKGRFTISRDNAKNSLYLQMNSLRAEDTALYYCARGVGATDYWGQGTLVTVSS

SEQ ID NO: 354 - protein, 8 aa, Homo sapiens
GFTFDDYG

SEQ ID NO: 355 - protein, 8 aa, Homo sapiens
IYWNGGST

SEQ ID NO: 356 - protein, 9 aa, Homo sapiens
ARGVGATDY

SEQ ID NO: 357 - DNA, 327 bp, Homo sapiens
gaaattgtgttgacgcagtctccaggcaccctgtctttgtctccaggggaaagagccaccctctcctgcagggccagtcagagtgttagcggcagcctcttagcctggtaccagcagaaacctggccaggctcccaggctcctcatctatggtgcatccagaagggccactggcatcccagacaggttcagtggcagtgggtctgggacagacttcactctcaccatcagcagactggagcctgaagattttgcagtgtattactgtcagcaatatggtaactcacccatgtgcagttttggccaggggaccaagctggagagcaaa

SEQ ID NO: 358 - protein, 109 aa, Homo sapiens
EIVLTQSPGTLSLSPGERATLSCRASQSVSGSLLAWYQQKPGQAPRLLIYGASRRATGIPDRFSGSGSGTDFTLTISRLEPEDFAVYYCQQYGNSPMCSFGQGTKLESK

SEQ ID NO: 359 - protein, 7 aa, Homo sapiens
QSVSGSL

SEQ ID NO: 360 - protein, 10 aa, Homo sapiens
QQYGNSPMCS

SEQ ID NO: 361 - DNA, 348 bp, Homo sapiens
gaggtgcagctggtggagtctgggggaggtgtggtacggcctggggggtccctgagactctcctgtgcagcctctggattcacctttgatgattatggcatgagctgggtccgccaagctccagggaaggggctggagtgggtctctggtatttattggaatggtggtagtacaggttatgcagactctgtgaagggccgattcaccatctccagagacaacgccaagaactccctgtatctgcaaatgaacagtctgagagccgaggacacggccttgtattactgtgcgagaggagtgggagctacagactactggggccagggaaccctggtcaccgtctcctca

SEQ ID NO: 362 - DNA, 327 bp, Homo sapiens
gaaattgtgttgacgcagtctccaggcaccctgtctttgtctccaggggaaagagccaccctctcctgcagggccagtcagagtgttagaggcagcttcttagcctggtaccagcagaaacctggccaggctcccaggctcctcatctatggtgcatccaggagggccactggcatcccagacaggttcagtggcagtgggtctgggacagacttcactctcaccatcagcagactggagcctgaagattttgcagtgtattactgtcagcaatatggtaactcacccatgtgcagttttggccaggggaccaagctggagatcaaa

SEQ ID NO: 363 - protein, 109 aa, Homo sapiens
EIVLTQSPGTLSLSPGERATLSCRASQSVRGSFLAWYQQKPGQAPRLLIYGASRRATGIPDRFSGSGSGTDFTLTISRLEPEDFAVYYCQQYGNSPMCSFGQGTKLEIK

SEQ ID NO: 364 - protein, 7 aa, Homo sapiens
QSVRGSF

SEQ ID NO: 365 - DNA, 348 bp, Homo sapiens
gaggtgcagctggtggagtctgggggaggtgtggtacggcctggggggtccctgagactctcctgtgcagcctctggattcacctttgatgattatggcatgagctgggtccgccaagctccagggaaggggctggagtgggtctctggtatttattggaatggtggtagcacaggttatgcagactctgtgaagggccgattcaccatctccagagacaacgccaagaactccctgtatctgcaaatgaacagtctgagagccgaggacatggccttgtattactgtgcgagaggagtgggagctacagactactggggccagggaaccctggtcaccgtctcctca

SEQ ID NO: 366 - protein, 116 aa, Homo sapiens
EVQLVESGGGVVRPGGSLRLSCAASGFTFDDYGMSWVRQAPGKGLEWVSGIYWNGGSTGYADSVKGRFTISRDNAKNSLYLQMNSLRAEDMALYYCARGVGATDYWGQGTLVTVSS

SEQ ID NO: 367 - DNA, 327 bp, Homo sapiens
gaaattgtgttgacgcagtctccaggcaccctgtctttgtcttcaggggaaagagccaccctcgcctgcagggccagtgagagtgttagaggcagcttcttagcctggtaccagcagaaacctggccaggctcccaggctcctcatctatggtgcatccaggagggccactggcatcccagacaggttcagtggcagtgggtctgggacagacttcactctcaccatcagcagactggagcctgaggattttgcagtgtattactgtcagcaatatggtaattcacccatgtgcagttttggccaggggaccaagctggagatcaaa

SEQ ID NO: 368 - protein, 109 aa, Homo sapiens
EIVLTQSPGTLSLSSGERATLACRASESVRGSFLAWYQQKPGQAPRLLIYGASRRATGIPDRFSGSGSGTDFTLTISRLEPEDFAVYYCQQYGNSPMCSFGQGTKLEIK

SEQ ID NO: 369 - protein, 7 aa, Homo sapiens
ESVRGSF

SEQ ID NO: 370 - DNA, 348 bp, Homo sapiens
gaggtgcaactggtggagtctgggggaggtgtggtacggcctggggggtccctgagactctcctgtgcagcctctggattcacctttgatgattatggcatgagctgggtccgccaagctccagggaaggggctggagtgggtctctggtatttattggaatggtggtagcacaggttatgcagactctgtgaagggccgattcaccatctccagagacaacgccaagaactccctgtatctgcaaatgaacagtctgagagccgaggacacggccttgtattactgtgcgagaggagtgggagctacagactactggggccagggaaccctggtcaccgtctcctca

SEQ ID NO: 371 - DNA, 327 bp, Homo sapiens
gaaattgtgttgacgcagtctccaggcaccctttttttgtctccaggggaaagagccaccctctcctgcagggccagtcagagtgttcgcggcagcttcttagcctggtatcaacagaaacctggccaggctcccaggctcctcatctatggtgcatccaggagggccactggcatcccagacaggttcagtggcagtgggtctgggacagacttcactctcaccatcagtagactggagcctgaagattttgcagtgtattactgtcagcaatatggtcactcacccatgtgcagttttggccaggggaccaagctggagatcaaa

SEQ ID NO: 372 - protein, 109 aa, Homo sapiens
EIVLTQSPGTLFLSPGERATLSCRASQSVRGSFLAWYQQKPGQAPRLLIYGASRRATGIPDRFSGSGSGTDFTLTISRLEPEDFAVYYCQQYGHSPMCSFGQGTKLEIK

SEQ ID NO: 373 - protein, 10 aa, Homo sapiens
QQYGHSPMCS

SEQ ID NO: 374 - DNA, 327 bp, Homo sapiens
gaaattgtgttgacgcagtctccaggcaccctgtctttgtctccaggggaaagagccaccctctcctgtagggccagtcagagtgttaggggcagcttcttagcctggtaccagcagaaacctggccaggctcccaggctcctcatctatggtgcatccagcagggccactggcatcccagacaggttcagtggcagtgggtctgggacagacttcactctcaccatcagcagactggagcctgaagattttgcagtgtattactgtcagcaatatggtaaatcacccatgtgcagttttggccaggggaccaacctggagatcaaa

SEQ ID NO: 375 - protein, 109 aa, Homo sapiens
EIVLTQSPGTLSLSPGERATLSCRASQSVRGSFLAWYQQKPGQAPRLLIYGASSRATGIPDRFSGSGSGTDFTLTISRLEPEDFAVYYCQQYGKSPMCSFGQGTNLEIK

SEQ ID NO: 376 - protein, 10 aa, Homo sapiens
QQYGKSPMCS

SEQ ID NO: 377 - DNA, 348 bp, Homo sapiens
gaggtgcagctggtggagtctgggggaggtgtggtacggcctggggggtccctgagactctcctgtgcagcctctggattcacctttgatgattatggcatgacctgggtccgccaagctccagggaaggggctggagtgggtctctggtattaattggaatggaggtagcacaggttctgcagactctgtgaagggccgattcaccatctccagagacaacgccaagaactccctgtgtctgcaaatgaacagtctgagagccgaggacacggccttgtattactgtgcgagaggagtgggagctacagattactggggccagggaaccctggtcaccgtctcctca

SEQ ID NO: 378 - protein, 116 aa, Homo sapiens
EVQLVESGGGVVRPGGSLRLSCAASGFTFDDYGMTWVRQAPGKGLEWVSGINWNGGSTGSADSVKGRFTISRDNAKNSLCLQMNSLRAEDTALYYCARGVGATDYWGQGTLVTVSS

SEQ ID NO: 379 - protein, 8 aa, Homo sapiens
INWNGGST

SEQ ID NO: 380 - DNA, 327 bp, Homo sapiens
gaaattgtgttgacgcagtctccaggcaccctgtctttgtctccaggggaaagagccaccctctcctgcagggccagtcagagtgttagcagcagcttcttagcctggtaccagcaaaaacctggccaggctcccaggctcctcatctatggtgcatcccgcaggtccactggcatcccagacaggttcagtggcagtgggtctgggacagacttcactctcaccatcagcagactggagcctgaagattttgcagtgtattactgtcagcagtatggtagctcacccatgtccagttttggccaggggaccaagctggagatcaaa

SEQ ID NO: 381 - protein, 109 aa, Homo sapiens
EIVLTQSPGTLSLSPGERATLSCRASQSVSSSFLAWYQQKPGQAPRLLIYGASRRSTGIPDRFSGSGSGTDFTLTISRLEPEDFAVYYCQQYGSSPMSSFGQGTKLEIK

SEQ ID NO: 382 - protein, 7 aa, Homo sapiens
QSVSSSF

SEQ ID NO: 383 - protein, 10 aa, Homo sapiens
QQYGSSPMSS

SEQ ID NO: 384 - DNA, 369 bp, Homo sapiens
caggtgcagctggtggagtctgggggaggcgtggtccagcctgggacgtccctgagactctcctgtgcagcctctggattcaccttcaatagctttggcatgcactgggtccgccaggctccaggcaaggggctggagtgggtggcagttatatcatatgatggaagtagtaaatactatgcagactccgtgaagggccgattcaccatctccagagacaattccaagaacacgctgtatctgcaaatgaacagcctgagagcggaggacacggctgtgtattactgtgcgaaagatgagggggactacgacgactactactacggtatggacgtctggggccaggggaccacggtcaccgtctcctca

SEQ ID NO: 385 - protein, 123 aa, Homo sapiens
QVQLVESGGGVVQPGTSLRLSCAASGFTFNSFGMHWVRQAPGKGLEWVAVISYDGSSKYYADSVKGRFTISRDNSKNTLYLQMNSLRAEDTAVYYCAKDEGDYDDYYYGMDVWGQGTTVTVSS

SEQ ID NO: 386 - protein, 8 aa, Homo sapiens
GFTFNSFG

SEQ ID NO: 387 - protein, 8 aa, Homo sapiens
ISYDGSSK

SEQ ID NO: 388 - protein, 16 aa, Homo sapiens
AKDEGDYDDYYYGMDV

SEQ ID NO: 389 - DNA, 321 bp, Homo sapiens
gaaattgtgttgacgcagtctccaggcagtctgtctttgtctccaggggaaagagccaccctctcctgcagggccagtcagagtcttagcagcagatacttggcctggtaccaccagaaacctggccaggctcccaggctcctcatctatggtgcatccagcagggccactggcatcccagacaggttcagtggcagtgggtctgggacagacttcactctcaccatcagcggactggagcctgaagattttgcagtgtattactgtcagcagtatggcaactcaatcactttcggcggagggaccaaggtggaaatcaaa

SEQ ID NO: 390 - protein, 107 aa, Homo sapiens
EIVLTQSPGSLSLSPGERATLSCRASQSLSSRYLAWYHQKPGQAPRLLIYGASSRATGIPDRFSGSGSGTDFTLTISGLEPEDFAVYYCQQYGNSITFGGGTKVEIK

SEQ ID NO: 391 - protein, 7 aa, Homo sapiens
QSLSSRY

SEQ ID NO: 392 - protein, 8 aa, Homo sapiens
QQYGNSIT

SEQ ID NO: 393 - DNA, 366 bp, Homo sapiens
caggtgcagctggtggagtctgggggagacgtggtccagcctgggaggtccctgagactctcctgtgcagcctctggattcaccttcagtcgctatggcatgcactgggtccgccaggctccaggcaaggggctggagtgggtggcagttatatcatatgatggaagtgataaatactatgcagactccgtgaagggccgattcaccatctccagagacaattccaagaacacgctgtatctgcaaatgaacagcctgagagctgaggacacggctgtgtattactgtgcgaaacagctgcccctttactactactactacggtatggacgtctggggccaagggaccacggtcaccgtctcctca

SEQ ID NO: 394 - protein, 122 aa, Homo sapiens
QVQLVESGGDVVQPGRSLRLSCAASGFTFSRYGMHWVRQAPGKGLEWVAVISYDGSDKYYADSVKGRFTISRDNSKNTLYLQMNSLRAEDTAVYYCAKQLPLYYYYYGMDVWGQGTTVTVSS

SEQ ID NO: 395 - protein, 8 aa, Homo sapiens
GFTFSRYG

SEQ ID NO: 396 - protein, 15 aa, Homo sapiens
AKQLPLYYYYYGMDV

SEQ ID NO: 397 - DNA, 321 bp, Homo sapiens
gccatccagttgacccagtctccatcctccctgtctgcatctgtaggagacagagtcaccatcacttgccgggcaagtcagggcattagcagtgctttagcctggtatcagcagaaaccagggaaagctcctaacctcctaatctatgatgcctccagtttggaaagtggggtcccatcaaggttcagcggcagtggatctgggacagatttcactctcaccatcagcagcctgcagcctgaagattttgcaacttattactgtcaacagtttaatatttaccctcacactttcggccctgggaccaaagtggatatcaaa

SEQ ID NO: 398 - protein, 107 aa, Homo sapiens
AIQLTQSPSSLSASVGDRVTITCRASQGISSALAWYQQKPGKAPNLLIYDASSLESGVPSRFSGSGSGTDFTLTISSLQPEDFATYYCQQFNIYPHTFGPGTKVDIK

SEQ ID NO: 399 - protein, 9 aa, Homo sapiens
QQFNIYPHT

SEQ ID NO: 400 - DNA, 348 bp, Homo sapiens
gaggtgcaactggtggagtctgggggaggtgtggtacggcctggggggtccctgagactctcctgtgcagcctctggattcacctttgatgattatggcatgacctgggtccgccaagctccagggaaggggctggagtgggtctctggtatttattggaatggtggtagcacaggttatgcagactctgtgaagggccgattcaccatctccagagacaacgccaagaactccctgtatctgcaaatgaacagtctgagagccgaggacacggccttgtattactgtgcgagaggagtgggagctacagactactggggccagggaaccctggtcaccgtctcctca

SEQ ID NO: 401 - protein, 116 aa, Homo sapiens
EVQLVESGGGVVRPGGSLRLSCAASGFTFDDYGMTWVRQAPGKGLEWVSGIYWNGGSTGYADSVKGRFTISRDNAKNSLYLQMNSLRAEDTALYYCARGVGATDYWGQGTLVTVSS

SEQ ID NO: 402 - DNA, 327 bp, Homo sapiens
gaaattgtgttgacgcagtctccaggcaccctgtttttgtctccaggggaaagagccaccctctcctgcaggaccagtcagaatattagcggcagcttcttagcctggtaccagcagaaatctggccaggttcccaggctcctcatctatggtgcatccaggagggccactggcatcccagacaggttcagtggcagtgggtctgggacagacttcactctcaccatcagcagactggagcctgaagattttgcagtgtattactgtcagcaatatggtaactcacccatgtgcagttttggccaggggaccaagctggagatcaaa

SEQ ID NO: 403 - protein, 109 aa, Homo sapiens
EIVLTQSPGTLFLSPGERATLSCRTSQNISGSFLAWYQQKSGQVPRLLIYGASRRATGIPDRFSGSGSGTDFTLTISRLEPEDFAVYYCQQYGNSPMCSFGQGTKLEIK

SEQ ID NO: 404 - protein, 7 aa, Homo sapiens
QNISGSF

SEQ ID NO: 405 - DNA, 327 bp, Homo sapiens
gaaaatgtgttgacgcagtctccaggcaccctgtttttgtctccaggggaaagagccaccctctcctgcagggccagtcagagtgttagcggcagcttcttagcctggtaccagcagaaacctggccaggctcccaggctcctcatttatggtgcatccaggagggccactggcatcccagacaggttcagtggcagtggggctgggacagacttcactctcaccatcagcagactggagcctgaagattttgcagtgtattactgtcagcaatataataactcacccatgtgcagttttggccaggggaccaagctggagatcaaa

SEQ ID NO: 406 - protein, 109 aa, Homo sapiens
ENVLTQSPGTLFLSPGERATLSCRASQSVSGSFLAWYQQKPGQAPRLLIYGASRRATGIPDRFSGSGAGTDFTLTISRLEPEDFAVYYCQQYNNSPMCSFGQGTKLEIK

SEQ ID NO: 407 - protein, 7 aa, Homo sapiens
QSVSGSF

SEQ ID NO: 408 - protein, 10 aa, Homo sapiens
QQYNNSPMCS

SEQ ID NO: 409 - DNA, 327 bp, Homo sapiens
gaaattgtgttgacgcagtctccaggcaccctgtttttgtctccaggggaaagagccaccctctcctgcagggccagtcagagtgttcgcggcagcttcttagcctggtatcagcagaaacctggccaggctcccaggctcctcatcaatggtgcatccaggagggccactggcatcccagacaggttcagtggcagtgggtctgggacagacttcactctcaccatcagtagactggagcctgaagattttgcagtgtattactgtcagcaatatggtaactcacccatgtgcagttttggccaggggaccaagctggagatcaaa

SEQ ID NO: 410 - protein, 109 aa, Homo sapiens
EIVLTQSPGTLFLSPGERATLSCRASQSVRGSFLAWYQQKPGQAPRLLINGASRRATGIPDRFSGSGSGTDFTLTISRLEPEDFAVYYCQQYGNSPMCSFGQGTKLEIK

SEQ ID NO: 411 - DNA, 369 bp, Homo sapiens
caggtgcaactggtggagtctgggggaggcgtggtccagcctgggaggtccctgagactctcctgtgcagcctctggattcaccttcagtagctttggcatgcactgggtccgccaggctccaggcaaggggctggagtgggtggcagttatatcatatgatggaagtagtaaagactatgcagactccgtgaagggccgattcaccatctccagagacaattccaagaacacgctgtatctgcaaatgaacagcctgggagcggaggacacggctgtgtattactgtgcgaaagatgagggggactacgacgactactattacggtatggacgtctggggccaagggaccacggtcaccgtctcctca

SEQ ID NO: 412 - protein, 123 aa, Homo sapiens
QVQLVESGGGVVQPGRSLRLSCAASGFTFSSFGMHWVRQAPGKGLEWVAVISYDGSSKDYADSVKGRFTISRDNSKNTLYLQMNSLGAEDTAVYYCAKDEGDYDDYYYGMDVWGQGTTVTVSS

SEQ ID NO: 413 - protein, 8 aa, Homo sapiens
GFTFSSFG

SEQ ID NO: 414 - DNA, 321 bp, Homo sapiens
gaaattgtgttgacgcagtctccaggcaccctgtctttgtctccaggggaaagagccaccctctcctgcagggccagtcagagtcttagcagcagatacttggcctggtaccaccagaaacctggccaggctcccaggctcttcatctatggtgcatccatcagggccactggcatcccagacaggttcagtggcagtgggtctgggacggacttcactctcaccatcagcggactggagcctgaagattttgcagtgtattactgtcagcagtatggtagttcaatcactttcggcagagggaccaaggtggagatcaaa

SEQ ID NO: 415 - protein, 107 aa, Homo sapiens
EIVLTQSPGTLSLSPGERATLSCRASQSLSSRYLAWYHQKPGQAPRLFIYGASIRATGIPDRFSGSGSGTDFTLTISGLEPEDFAVYYCQQYGSSITFGRGTKVEIK

SEQ ID NO: 416 - protein, 8 aa, Homo sapiens
QQYGSSIT

SEQ ID NO: 417 - DNA, 990 bp, Homo sapiens
gcctccaccaagggcccatcggtcttccccctggcaccctcctccaagagcacctctgggggcacagcggccctgggctgcctggtcaaggactacttccccgaaccggtgacggtgtcgtggaactcaggcgccctgaccagcggcgtgcacaccttcccggctgtcctacagtcctcaggactctactccctcagcagcgtggtgaccgtgccctccagcagcttgggcacccagacctacatctgcaacgtgaatcacaagcccagcaacaccaaggtggacaagaaagttgagcccaaatcttgtgacaaaactcacacatgcccaccgtgcccagcacctgaactcctggggggaccgtcagtcttcctcttccccccaaaacccaaggacaccctcatgatctcccggacccctgaggtcacatgcgtggtggtggacgtgagccacgaagaccctgaggtcaagttcaactggtacgtggacggcgtggaggtgcataatgccaagacaaagccgcgggaggagcagtacaacagcacgtaccgggtggtcagcgtcctcaccgtcctgcaccaggactggctgaatggcaaggagtacaagtgcaaggtctccaacaaagccctcccagcccccatcgagaaaaccatctccaaagccaaagggcagccccgagaaccacaggtgtacaccctgcccccatcccgggatgagctgaccaagaaccaggtcagcctgacctgcctggtcaaaggcttctatcccagcgacatcgccgtggagtgggagagcaatgggcagccggagaacaactacaagaccacgcctcccgtgctggactccgacggctccttcttcctctacagcaagctcaccgtggacaagagcaggtggcagcaggggaacgtcttctcatgctccgtgatgcatgaggctctgcacaaccactacacgcagaagagcctctccctgtctccgggtaaa

SEQ ID NO: 418 - protein, 330 aa, Homo sapiens [sequence omitted]

SEQ ID NO: 419 - DNA, 990 bp, Homo sapiens
gcctccaccaagggcccatcggtcttccccctggcaccctcctccaagagcacctctgggggcacagcggccctgggctgcctggtcaaggactacttccccgaaccggtgacggtgtcgtggaactcaggcgccctgaccagcggcgtgcacaccttcccggctgtcctacagtcctcaggactctactccctcagcagcgtggtgaccgtgccctccagcagcttgggcacccagacctacatctgcaacgtgaatcacaagcccagcaacaccaaggtggacaagaaagttgagcccaaatcttgtgacaaaactcacacatgcccaccgtgcccagcacctgaactcctggggggaccgtcagtcttcctcttccccccaaaacccaaggacaccctcatgatctcccggacccctgaggtcacatgcgtggtggtggacgtgagccacgaagaccctgaggtcaagttcaactggtacgtggacggcgtggaggtgcataatgccaagacaaagccgcgggaggagcagtacaacagcacgtaccgtgtggtcagcgtcctcaccgtcctgcaccaggactggctgaatggcaaggagtacaagtgcaaggtctccaacaaagccctcccagcccccatcgagaaaaccatctccaaagccaaagggcagccccgagaaccacaggtgtacaccctgcccccatcccgggatgagctgaccaagaaccaggtcagcctgacctgcctggtcaaaggcttctatcccagcgacatcgccgtggagtgggagagcaatgggcagccggagaacaactacaagaccacgcctcccgtgctggactccgacggctccttcttcctctacagcaagctcaccgtggacaagagcaggtggcagcaggggaacgtcttctcatgctccgtgatgcatgaggctctgcacaaccactacacgcagaagagcctctccctgtctccgggtaaa

SEQ ID NO: 420 - protein, 330 aa, Homo sapiens [sequence omitted]

SEQ ID NO: 421 - DNA, 990 bp, Homo sapiens
gcctccaccaagggcccatcggtcttccccctggcaccctcctccaagagcacctctgggggcacagcggccctgggctgcctggtcaaggactacttccccgaaccggtgacggtgtcgtggaactcaggcgccctgaccagcggcgtgcacaccttcccggctgtcctacagtcctcaggactctactccctcagcagcgtggtgaccgtgccctccagcagcttgggcacccagacctacatctgcaacgtgaatcacaagcccagcaacaccaaggtggacaagagagttgagcccaaatcttgtgacaaaactcacacatgcccaccgtgcccagcacctgaactcctggggggaccgtcagtcttcctcttccccccaaaacccaaggacaccctcatgatctcccggacccctgaggtcacatgcgtggtggtggacgtgagccacgaagaccctgaggtcaagttcaactggtacgtggacggcgtggaggtgcataatgccaagacaaagccgcgggaggagcagtacaacagcacgtaccgtgtggtcagcgtcctcaccgtcctgcaccaggactggctgaatggcaaggagtacaagtgcaaggtctccaacaaagccctcccagcccccatcgagaaaaccatctccaaagccaaagggcagccccgagaaccacaggtgtacaccctgcccccatcccgggaggagatgaccaagaaccaggtcagcctgacctgcctggtcaaaggcttctatcccagcgacatcgccgtggagtgggagagcaatgggcagccggagaacaactacaagaccacgcctcccgtgctggactccgacggctccttcttcctctatagcaagctcaccgtggacaagagcaggtggcagcaggggaacgtcttctcatgctccgtgatgcatgaggctctgcacaaccactacacgcagaagagcctctccctgtccccgggtaaa

SEQ ID NO: 422 - protein, 330 aa, Homo sapiens
ASTKGPSVFPLAPSSKSTSGGTAALGCLVKDYFPEPVTVSWNSGALTSGVHTFPAVLQSSGLYSLSSVVTVPSSSLGTQTYICNVNHKPSNTKVDKRVEPKSCDKTHTCPPCPAPELLGGPSVFLFPPKPKDTLMISRTPEVTCVVVDVSHEDPEVKFNWYVDGVEVHNAKTKPREEQYNSTYRVVSVLTVLHQDWLNGKEYKCKVSNKALPAPIEKTISKAKGQPREPQVYTLPPSREEMTKNQVSLTCLVKGFYPSDIAVEWESNGQPENNYKTTPPVLDSDGSFFLYSKLTVDKSRWQQGNVFSCSVMHEALHNHYTQKSLSLSPGK

SEQ ID NO: 423 - DNA, 990 bp, Homo sapiens
gcctccaccaagggcccatcggtcttccccctggcaccctcctccaagagcacctctgggggcacagcggccctgggctgcctggtcaaggactacttccccgaaccggtgacggtgtcgtggaactcaggcgccctgaccagcggcgtgcacaccttcccggctgtcctacagtcctcaggactctactccctcagcagcgtggtgaccgtgccctccagcagcttgggcacccagacctacatctgcaacgtgaatcacaagcccagcaacaccaaggtggacaagaaagttgagcccaaatcttgtgacaaaactcacacatgcccaccgtgcccagcacctgaactcctggggggaccgtcagtcttcctcttccccccaaaacccaaggacaccctcatgatctcccggacccctgaggtcacatgcgtggtggtggacgtgagccacgaagaccctgaggtcaagttcaactggtacgtggacggcgtggaggtgcataatgccaagacaaagccgcgggaggagcagtacaacagcacgtaccgtgtggtcagcgtcctcaccgtcctgcaccaggactggctgaatggcaaggagtacaagtgcaaggtctccaacaaagccctcccagcccccatcgagaaaaccatctccaaagccaaagggcagccccgagaaccacaggtgtacaccctgcccccatcccgggatgagctgaccaagaaccaggtcagcctgacctgcctggtcaaaggcttctatcccagcgacatcgccgtggagtgggagagcaatgggcagccggagaacaactacaagaccacgcctcccgtgctggactccgacggctccttcttcctctacagcaagctcaccgtggacaagagcaggtggcagcaggggaacatcttctcatgctccgtgatgcatgaggctctgcacaaccactacacgcagaagagcctctccctgtctccgggtaaa

SEQ ID NO: 424 - protein, 330 aa, Homo sapiens
ASTKGPSVFPLAPSSKSTSGGTAALGCLVKDYFPEPVTVSWNSGALTSGVHTFPAVLQSSGLYSLSSVVTVPSSSLGTQTYICNVNHKPSNTKVDKKVEPKSCDKTHTCPPCPAPELLGGPSVFLFPPKPKDTLMISRTPEVTCVVVDVSHEDPEVKFNWYVDGVEVHNAKTKPREEQYNSTYRVVSVLTVLHQDWLNGKEYKCKVSNKALPAPIEKTISKAKGQPREPQVYTLPPSRDELTKNQVSLTCLVKGFYPSDIAVEWESNGQPENNYKTTPPVLDSDGSFFLYSKLTVDKSRWQQGNIFSCSVMHEALHNHYTQKSLSLSPGK

SEQ ID NO: 425 - DNA, 990 bp, Homo sapiens
gcctccaccaagggcccatcggtcttccccctggcaccctcctccaagagcacctctgggggcacagcggccctgggctgcctggtcaaggactacttccccgaaccggtgacggtgtcgtggaactcaggcgccctgaccagcggcgtgcacaccttcccggctgtcctacagtcctcaggactctactccctcagcagcgtggtgaccgtgccctccagcagcttgggcacccagacctacatctgcaacgtgaatcacaagcccagcaacaccaaggtggacaagaaagtggagcccaaatcttgtgacaaaactcacacatgcccaccgtgcccagcacctgaactcgcgggggcaccgtcagtcttcctcttccccccaaaacccaaggacaccctcatgatctcccggacccctgaggtcacatgcgtggtggtggacgtgagccacgaagaccctgaggtcaagttcaactggtacgtggacggcgtggaggtgcataatgccaagacaaagccgcgggaggagcagtacaacagcacgtaccgtgtggtcagcgtcctcaccgtcctgcaccaggactggctgaatggcaaggagtacaagtgcaaggtctccaacaaagccctcccagcccccatcgagaaaaccatctccaaagccaaagggcagccccgagaaccacaggtgtacaccctgcccccatcccgggatgagctgaccaagaaccaggtcagcctgacctgcctggtcaaaggcttctatcccagcgacatcgccgtggagtgggagagcaatgggcagccggagaacaactacaagaccacgcctcccgtgctggactccgacggctccttcttcctctacagcaagctcaccgtggacaagagcaggtggcagcaggggaacgtcttctcatgctccgtgatgcatgaggctctgcacaaccactacacgcagaagagcctctccctgtctccgggtaaa

SEQ ID NO: 426 - protein, 330 aa, Homo sapiens
ASTKGPSVFPLAPSSKSTSGGTAALGCLVKDYFPEPVTVSWNSGALTSGVHTFPAVLQSSGLYSLSSVVTVPSSSLGTQTYICNVNHKPSNTKVDKKVEPKSCDKTHTCPPCPAPELAGAPSVFLFPPKPKDTLMISRTPEVTCVVVDVSHEDPEVKFNWYVDGVEVHNAKTKPREEQYNSTYRVVSVLTVLHQDWLNGKEYKCKVSNKALPAPIEKTISKAKGQPREPQVYTLPPSRDELTKNQVSLTCLVKGFYPSDIAVEWESNGQPENNYKTTPPVLDSDGSFFLYSKLTVDKSRWQQGNVFSCSVMHEALHNHYTQKSLSLSPGK

SEQ ID NO: 427 - DNA, 978 bp, Homo sapiens
gcctccaccaagggcccatcggtcttccccctggcgccctgctccaggagcacctccgagagcacagccgccctgggctgcctggtcaaggactacttccccgaaccggtgacggtgtcgtggaactcaggcgctctgaccagcggcgtgcacaccttcccagctgtcctacagtcctcaggactctactccctcagcagcgtggtgaccgtgccctccagcaacttcggcacccagacctacacctgcaacgtagatcacaagcccagcaacaccaaggtggacaagacagttgagcgcaaatgttgtgtcgagtgcccaccgtgcccagcaccacctgtggcaggaccgtcagtcttcctcttccccccaaaacccaaggacaccctcatgatctcccggacccctgaggtcacgtgcgtggtggtggacgtgagccacgaagaccccgaggtccagttcaactggtacgtggacggcgtggaggtgcataatgccaagacaaagccacgggaggagcagttcaacagcacgttccgtgtggtcagcgtcctcaccgttgtgcaccaggactggctgaacggcaaggagtacaagtgcaaggtctccaacaaaggcctcccagcccccatcgagaaaaccatctccaaaaccaaagggcagccccgagaaccacaggtgtacaccctgcccccatcccgggaggagatgaccaagaaccaggtcagcctgacctgcctggtcaaaggcttctaccccagcgacatcgccgtggagtgggagagcaatgggcagccggagaacaactacaagaccacacctcccatgctggactccgacggctccttcttcctctacagcaagctcaccgtggacaagagcaggtggcagcaggggaacgtcttctcatgctccgtgatgcatgaggctctgcacaaccactacacgcagaagagcctctccctgtctccgggtaaa

SEQ ID NO: 428 - protein, 326 aa, Homo sapiens
ASTKGPSVFPLAPCSRSTSESTAALGCLVKDYFPEPVTVSWNSGALTSGVHTFPAVLQSSGLYSLSSVVTVPSSNFGTQTYTCNVDHKPSNTKVDKTVERKCCVECPPCPAPPVAGPSVFLFPPKPKDTLMISRTPEVTCVVVDVSHEDPEVQFNWYVDGVEVHNAKTKPREEQFNSTFRVVSVLTVVHQDWLNGKEYKCKVSNKGLPAPIEKTISKTKGQPREPQVYTLPPSREEMTKNQVSLTCLVKGFYPSDIAVEWESNGQPENNYKTTPPMLDSDGSFFLYSKLTVDKSRWQQGNVFSCSVMHEALHNHYTQKSLSLSPGK

SEQ ID NO: 429 - DNA, 978 bp, Homo sapiens
gcctccaccaagggcccatcggtcttccccctggcgccctgctccaggagcacctccgagagcacagcggccctgggctgcctggtcaaggactacttccccgaaccggtgacggtgtcgtggaactcaggcgctctgaccagcggcgtgcacaccttcccggctgtcctacagtcctcaggactctactccctcagcagcgtggtgaccgtgacctccagcaacttcggcacccagacctacacctgcaacgtagatcacaagcccagcaacaccaaggtggacaagacagttgagcgcaaatgttgtgtcgagtgcccaccgtgcccagcaccacctgtggcaggaccgtcagtcttcctcttccccccaaaacccaaggacaccctcatgatctcccggacccctgaggtcacgtgcgtggtggtggacgtgagccacgaagaccccgaggtccagttcaactggtacgtggacggcatggaggtgcataatgccaagacaaagccacgggaggagcagttcaacagcacgttccgtgtggtcagcgtcctcaccgtcgtgcaccaggactggctgaacggcaaggagtacaagtgcaaggtctccaacaaaggcctcccagcccccatcgagaaaaccatctccaaaaccaaagggcagccccgagaaccacaggtgtacaccctgcccccatcccgggaggagatgaccaagaaccaggtcagcctgacctgcctggtcaaaggcttctaccccagcgacatcgccgtggagtgggagagcaatgggcagccggagaacaactacaagaccacacctcccatgctggactccgacggctccttcttcctctacagcaagctcaccgtggacaagagcaggtggcagcaggggaacgtcttctcatgctccgtgatgcatgaggctctgcacaaccactacacacagaagagcctctccctgtctccgggtaaa

SEQ ID NO: 430 - protein, 326 aa, Homo sapiens
ASTKGPSVFPLAPCSRSTSESTAALGCLVKDYFPEPVTVSWNSGALTSGVHTFPAVLQSSGLYSLSSVVTVTSSNFGTQTYTCNVDHKPSNTKVDKTVERKCCVECPPCPAPPVAGPSVFLFPPKPKDTLMISRTPEVTCVVVDVSHEDPEVQFNWYVDGMEVHNAKTKPREEQFNSTFRVVSVLTVVHQDWLNGKEYKCKVSNKGLPAPIEKTISKTKGQPREPQVYTLPPSREEMTKNQVSLTCLVKGFYPSDIAVEWESNGQPENNYKTTPPMLDSDGSFFLYSKLTVDKSRWQQGNVFSCSVMHEALHNHYTQKSLSLSPGK

SEQ ID NO: 431 - DNA, 978 bp, Homo sapiens
gcctccaccaagggcccatcggtcttccccctggcgccctgctccaggagcacctccgagagcacagcggccctgggctgcctggtcaaggactacttccccgaaccggtgacggtgtcgtggaactcaggcgctctgaccagcggcgtgcacaccttcccagctgtcctacagtcctcaggactctactccctcagcagcgtggtgaccgtgccctccagcagcttgggcacccagacctacacctgcaacgtagatcacaagcccagcaacaccaaggtggacaagacagttgagcgcaaatgttgtgtcgagtgcccaccgtgcccagcaccacctgtggcaggaccgtcagtcttcctcttccccccaaaacccaaggacaccctcatgatctcccggacccctgaggtcacgtgcgtggtggtggacgtgagccacgaagaccccgaggtccagttcaactggtacgtggacggcgtggaggtgcataatgccaagacaaagccacgggaggagcagttcaacagcacgttccgtgtggtcagcgtcctcaccgttgtgcaccaggactggctgaacggcaaggagtacaagtgcaaggtctccaacaaaggcctcccagcccccatcgagaaaaccatctccaaaaccaaagggcagccccgagaaccacaggtgtacaccctgcccccatcccgggaggagatgaccaagaaccaggtcagcctgacctgcctggtcaaaggcttctaccccagcgacatcgccgtggagtgggagagcaatgggcagccggagaacaactacaagaccacacctcccatgctggactccgacggctccttcttcctctacagcaagctcaccgtggacaagagcaggtggcagcaggggaacgtcttctcatgctccgtgatgcatgaggctctgcacaaccactacacgcagaagagcctctccctgtctccgggtaaa

SEQ ID NO: 432 - protein, 326 aa, Homo sapiens
ASTKGPSVFPLAPCSRSTSESTAALGCLVKDYFPEPVTVSWNSGALTSGVHTFPAVLQSSGLYSLSSVVTVPSSSLGTQTYTCNVDHKPSNTKVDKTVERKCCVECPPCPAPPVAGPSVFLFPPKPKDTLMISRTPEVTCVVVDVSHEDPEVQFNWYVDGVEVHNAKTKPREEQFNSTFRVVSVLTVVHQDWLNGKEYKCKVSNKGLPAPIEKTISKTKGQPREPQVYTLPPSREEMTKNQVSLTCLVKGFYPSDIAVEWESNGQPENNYKTTPPMLDSDGSFFLYSKLTVDKSRWQQGNVFSCSVMHEALHNHYTQKSLSLSPGK

SEQ ID NO: 433 - DNA, 978 bp, Homo sapiens
gcctccaccaagggcccatcggtcttccccctggcgccctgctccaggagcacctccgagagcacagcggccctgggctgcctggtcaaggactacttccccgaaccggtgacggtgtcgtggaactcaggcgctctgaccagcggcgtgcacaccttcccggctgtcctacagtcctcaggactctactccctcagcagcgtggtgaccgtgccctccagcaacttcggcacccagacctacacctgcaacgtagatcacaagcccagcaacaccaaggtggacaagacagttgagcgcaaatgttgtgtcgagtgcccaccgtgcccagcaccacctgtggcaggaccgtcagtcttcctcttccccccaaaacccaaggacaccctcatgatctcccggacccctgaggtcacgtgcgtggtggtggacgtgagccacgaagaccccgaggtccagttcaactggtacgtggacggcgtggaggtgcataatgccaagacaaagccacgggaggagcagttcaacagcacgttccgtgtggtcagcgtcctcaccgtcgtgcaccaggactggctgaacggcaaggagtacaagtgcaaggtctccaacaaaggcctcccagcccccatcgagaaaaccatctccaaaaccaaagggcagccccgagaaccacaggtgtacaccctgcccccatcccgggaggagatgaccaagaaccaggtcagcctgacctgcctggtcaaaggcttctaccccagcgacatctccgtggagtgggagagcaatgggcagccggagaacaactacaagaccacacctcccatgctggactccgacggctccttcttcctctacagcaagctcaccgtggacaagagcaggtggcagcaggggaacgtcttctcatgctccgtgatgcatgaggctctgcacaaccactacacacagaagagcctctccctgtctccgggtaaa

SEQ ID NO: 434 - protein, 326 aa, Homo sapiens
ASTKGPSVFPLAPCSRSTSESTAALGCLVKDYFPEPVTVSWNSGALTSGVHTFPAVLQSSGLYSLSSVVTVPSSNFGTQTYTCNVDHKPSNTKVDKTVERKCCVECPPCPAPPVAGPSVFLFPPKPKDTLMISRTPEVTCVVVDVSHEDPEVQFNWYVDGVEVHNAKTKPREEQFNSTFRVVSVLTVVHQDWLNGKEYKCKVSNKGLPAPIEKTISKTKGQPREPQVYTLPPSREEMTKNQVSLTCLVKGFYPSDISVEWESNGQPENNYKTTPPMLDSDGSFFLYSKLTVDKSRWQQGNVFSCSVMHEALHNHYTQKSLSLSPGK

SEQ ID NO: 435 - DNA, 981 bp, Homo sapiens
gcttccaccaagggcccatccgtcttccccctggcgccctgctccaggagcacctccgagagcacagccgccctgggctgcctggtcaaggactacttccccgaaccggtgacggtgtcgtggaactcaggcgccctgaccagcggcgtgcacaccttcccggctgtcctacagtcctcaggactctactccctcagcagcgtggtgaccgtgccctccagcagcttgggcacgaagacctacacctgcaacgtagatcacaagcccagcaacaccaaggtggacaagagagttgagtccaaatatggtcccccatgcccatcatgcccagcacctgagttcctggggggaccatcagtcttcctgttccccccaaaacccaaggacactctcatgatctcccggacccctgaggtcacgtgcgtggtggtggacgtgagccaggaagaccccgaggtccagttcaactggtacgtggatggcgtggaggtgcataatgccaagacaaagccgcgggaggagcagttcaacagcacgtaccgtgtggtcagcgtcctcaccgtcctgcaccaggactggctgaacggcaaggagtacaagtgcaaggtctccaacaaaggcctcccgtcctccatcgagaaaaccatctccaaagccaaagggcagccccgagagccacaggtgtacaccctgcccccatcccaggaggagatgaccaagaaccaggtcagcctgacctgcctggtcaaaggcttctaccccagcgacatcgccgtggagtgggagagcaatgggcagccggagaacaactacaagaccacgcctcccgtgctggactccgacggctccttcttcctctacagcaggctaaccgtggacaagagcaggtggcaggaggggaatgtcttctcatgctccgtgatgcatgaggctctgcacaaccactacacacagaagagcctctccctgtctctgggtaaa

SEQ ID NO: 436 - protein, 327 aa, Homo sapiens
ASTKGPSVFPLAPCSRSTSESTAALGCLVKDYFPEPVTVSWNSGALTSGVHTFPAVLQSSGLYSLSSVVTVPSSSLGTKTYTCNVDHKPSNTKVDKRVESKYGPPCPSCPAPEFLGGPSVFLFPPKPKDTLMISRTPEVTCVVVDVSQEDPEVQFNWYVDGVEVHNAKTKPREEQFNSTYRVVSVLTVLHQDWLNGKEYKCKVSNKGLPSSIEKTISKAKGQPREPQVYTLPPSQEEMTKNQVSLTCLVKGFYPSDIAVEWESNGQPENNYKTTPPVLDSDGSFFLYSRLTVDKSRWQEGNVFSCSVMHEALHNHYTQKSLSLSLGK

SEQ ID NO: 437 - DNA, 981 bp, Homo sapiens
gcttccaccaagggcccatccgtcttccccctggcgccctgctccaggagcacctccgagagcacagccgccctgggctgcctggtcaaggactacttccccgaaccggtgacggtgtcgtggaactcaggcgccctgaccagcggcgtgcacaccttcccggctgtcctacagtcctcaggactctactccctcagcagcgtggtgaccgtgccctccagcagcttgggcacgaagacctacacctgcaacgtagatcacaagcccagcaacaccaaggtggacaagagagttgagtccaaatatggtcccccgtgcccatcatgcccagcacctgagttcctggggggaccatcagtcttcctgttccccccaaaacccaaggacactctcatgatctcccggacccctgaggtcacgtgcgtggtggtggacgtgagccaggaagaccccgaggtccagttcaactggtacgtggatggcgtggaggtgcataatgccaagacaaagccgcgggaggagcagttcaacagcacgtaccgtgtggtcagcgtcctcaccgtcgtgcaccaggactggctgaacggcaaggagtacaagtgcaaggtctccaacaaaggcctcccgtcctccatcgagaaaaccatctccaaagccaaagggcagccccgagagccacaggtgtacaccctgcccccatcccaggaggagatgaccaagaaccaggtcagcctgacctgcctggtcaaaggcttctaccccagcgacatcgccgtggagtgggagagcaatgggcagccggagaacaactacaagaccacgcctcccgtgctggactccgacggctccttcttcctctacagcaggctaaccgtggacaagagcaggtggcaggaggggaatgtcttctcatgctccgtgatgcatgaggctctgcacaaccactacacgcagaagagcctctccctgtctctgggtaaa

SEQ ID NO: 438 - protein, 327 aa, Homo sapiens
ASTKGPSVFPLAPCSRSTSESTAALGCLVKDYFPEPVTVSWNSGALTSGVHTFPAVLQSSGLYSLSSVVTVPSSSLGTKTYTCNVDHKPSNTKVDKRVESKYGPPCPSCPAPEFLGGPSVFLFPPKPKDTLMISRTPEVTCVVVDVSQEDPEVQFNWYVDGVEVHNAKTKPREEQFNSTYRVVSVLTVVHQDWLNGKEYKCKVSNKGLPSSIEKTISKAKGQPREPQVYTLPPSQEEMTKNQVSLTCLVKGFYPSDIAVEWESNGQPENNYKTTPPVLDSDGSFFLYSRLTVDKSRWQEGNVFSCSVMHEALHNHYTQKSLSLSLGK

SEQ ID NO: 439 - DNA, 981 bp, Homo sapiens
gcttccaccaagggcccatccgtcttccccctggcgccctgctccaggagcacctccgagagcacagccgccctgggctgcctggtcaaggactacttccccgaaccggtgacggtgtcgtggaactcaggcgccctgaccagcggcgtgcacaccttcccggctgtcctacagtcctcaggactctactccctcagcagcgtggtgaccgtgccctccagcagcttgggcacgaagacctacacctgcaacgtagatcacaagcccagcaacaccaaggtggacaagagagttgagtccaaatatggtcccccatgcccatcatgcccagcacctgagttcctggggggaccatcagtcttcctgttccccccaaaacccaaggacactctcatgatctcccggacccctgaggtcacgtgcgtggtggtggacgtgagccaggaagaccccgaggtccagttcaactggtacgtggatggcgtggaggtgcataatgccaagacaaagccgcgggaggagcagttcaacagcacgtaccgtgtggtcagcgtcctcaccgtcctgcaccaggactggctgaacggcaaggagtacaagtgcaaggtctccaacaaaggcctcccgtcctccatcgagaaaaccatctccaaagccaaagggcagccccgagagccacaggtgtacaccctgcccccatcccaggaggagatgaccaagaaccaggtcagcctgacctgcctggtcaaaggcttctaccccagcgacatcgccgtggagtgggagagcaatgggcagccggagaacaactacaagaccacgcctcccgtgctggactccgacggctccttcttcctctacagcaagctcaccgtggacaagagcaggtggcaggaggggaacgtcttctcatgctccgtgatgcatgaggctctgcacaaccactacacgcagaagagcctctccctgtctctgggtaaa

SEQ ID NO: 440 - protein, 327 aa, Homo sapiens
ASTKGPSVFPLAPCSRSTSESTAALGCLVKDYFPEPVTVSWNSGALTSGVHTFPAVLQSSGLYSLSSVVTVPSSSLGTKTYTCNVDHKPSNTKVDKRVESKYGPPCPSCPAPEFLGGPSVFLFPPKPKDTLMISRTPEVTCVVVDVSQEDPEVQFNWYVDGVEVHNAKTKPREEQFNSTYRVVSVLTVLHQDWLNGKEYKCKVSNKGLPSSIEKTISKAKGQPREPQVYTLPPSQEEMTKNQVSLTCLVKGFYPSDIAVEWESNGQPENNYKTTPPVLDSDGSFFLYSKLTVDKSRWQEGNVFSCSVMHEALHNHYTQKSLSLSLGK

SEQ ID NO: 441 - DNA, 981 bp, Homo sapiens
gcctccaccaagggcccatccgtcttccccctggcgccctgctccaggagcacctccgagagcacggccgccctgggctgcctggtcaaggactacttccccgaaccagtgacggtgtcgtggaactcaggcgccctgaccagcggcgtgcacaccttcccggctgtcctacagtcctcaggactctactccctcagcagcgtggtgaccgtgccctccagcagcttgggcacgaagacctacacctgcaacgtagatcacaagcccagcaacaccaaggtggacaagagagttgagtccaaatatggtcccccatgcccaccatgcccagcgcctgaatttgaggggggaccatcagtcttcctgttccccccaaaacccaaggacactctcatgatctcccggacccctgaggtcacgtgcgtggtggtggacgtgagccaggaagaccccgaggtccagttcaactggtacgtggatggcgtggaggtgcataatgccaagacaaagccgcgggaggagcagttcaacagcacgtaccgtgtggtcagcgtcctcaccgtcctgcaccaggactggctgaacggcaaggagtacaagtgcaaggtctccaacaaaggcctcccgtcatcgatcgagaaaaccatctccaaagccaaagggcagccccgagagccacaggtgtacaccctgcccccatcccaggaggagatgaccaagaaccaggtcagcctgacctgcctggtcaaaggcttctaccccagcgacatcgccgtggagtgggagagcaatgggcagccggagaacaactacaagaccacgcctcccgtgctggactccgacggatccttcttcctctacagcaggctaaccgtggacaagagcaggtggcaggaggggaatgtcttctcatgctccgtgatgcatgaggctctgcacaaccactacacacagaagagcctctccctgtctctgggtaaa

SEQ ID NO: 442 - DNA, 981 bp, Homo sapiens
gcctccaccaagggacctagcgtgttccctctcgccccctgttccaggtccacaagcgagtccaccgctgccctcggctgtctggtgaaagactactttcccgagcccgtgaccgtctcctggaatagcggagccctgacctccggcgtgcacacatttcccgccgtgctgcagagcagcggactgtatagcctgagcagcgtggtgaccgtgcccagctccagcctcggcaccaaaacctacacctgcaacgtggaccacaagccctccaacaccaaggtggacaagcgggtggagagcaagtacggccccccttgccctccttgtcctgcccctgagttcgagggaggaccctccgtgttcctgtttccccccaaacccaaggacaccctgatgatctcccggacacccgaggtgacctgtgtggtcgtggacgtcagccaggaggaccccgaggtgcagttcaactggtatgtggacggcgtggaggtgcacaatgccaaaaccaagcccagggaggagcagttcaattccacctacagggtggtgagcgtgctgaccgtcctgcatcaggattggctgaacggcaaggagtacaagtgcaaggtgtccaacaagggactgcccagctccatcgagaagaccatcagcaaggctaagggccagccgagggagccccaggtgtataccctgcctcctagccaggaagagatgaccaagaaccaagtgtccctgacctgcctggtgaagggattctacccctccgacatcgccgtggagtgggagagcaatggccagcccgagaacaactacaaaacaacccctcccgtgctcgatagcgacggcagcttctttctctacagccggctgacagtggacaagagcaggtggcaggagggcaacgtgttctcctgttccgtgatgcacgaggccctgcacaatcactacacccagaagagcctctccctgtccctgggcaag

SEQ ID NO: 443 - DNA, 981 bp, Homo sapiens
gccagcaccaagggcccttccgtgttccccctggccccttgcagcaggagcacctccgaatccacagctgccctgggctgtctggtgaaggactactttcccgagcccgtgaccgtgagctggaacagcggcgctctgacatccggcgtccacacctttcctgccgtcctgcagtcctccggcctctactccctgtcctccgtggtgaccgtgcctagctcctccctcggcaccaagacctacacctgtaacgtggaccacaaaccctccaacaccaaggtggacaaacgggtcgagagcaagtacggccctccctgccctccttgtcctgcccccgagttcgaaggcggacccagcgtgttcctgttccctcctaagcccaaggacaccctcatgatcagccggacacccgaggtgacctgcgtggtggtggatgtgagccaggaggaccctgaggtccagttcaactggtatgtggatggcgtggaggtgcacaacgccaagacaaagccccgggaagagcagttcaactccacctacagggtggtcagcgtgctgaccgtgctgcatcaggactggctgaacggcaaggagtacaagtgcaaggtcagcaataagggactgcccagcagcatcgagaagaccatctccaaggctaaaggccagccccgggaacctcaggtgtacaccctgcctcccagccaggaggagatgaccaagaaccaggtgagcctgacctgcctggtgaagggattctacccttccgacatcgccgtggagtgggagtccaacggccagcccgagaacaattataagaccacccctcccgtcctcgacagcgacggatccttctttctgtactccaggctgaccgtggataagtccaggtggcaggaaggcaacgtgttcagctgctccgtgatgcacgaggccctgcacaatcactacacccagaagtccctgagcctgtccctgggaaag

SEQ ID NO: 444 - protein, 327 aa, Homo sapiens
ASTKGPSVFPLAPCSRSTSESTAALGCLVKDYFPEPVTVSWNSGALTSGVHTFPAVLQSSGLYSLSSVVTVPSSSLGTKTYTCNVDHKPSNTKVDKRVESKYGPPCPPCPAPEFEGGPSVFLFPPKPKDTLMISRTPEVTCVVVDVSQEDPEVQFNWYVDGVEVHNAKTKPREEQFNSTYRVVSVLTVLHQDWLNGKEYKCKVSNKGLPSSIEKTISKAKGQPREPQVYTLPPSQEEMTKNQVSLTCLVKGFYPSDIAVEWESNGQPENNYKTTPPVLDSDGSFFLYSRLTVDKSRWQEGNVFSCSVMHEALHNHYTQKSLSLSLGK

SEQ ID NO: 445 - DNA, 981 bp, Homo sapiens
gcctccaccaagggcccatccgtcttccccctggcgccctgctccaggagcacctccgagagcacggccgccctgggctgcctggtcaaggactacttccccgaaccagtgacggtgtcgtggaactcaggcgccctgaccagcggcgtgcacaccttcccggctgtcctacagtcctcaggactctactccctcagcagcgtggtgaccgtgccctccagcagcttgggcacgaagacctacacctgcaacgtagatcacaagcccagcaacaccaaggtggacaagagagttgagtccaaatatggtcccccatgcccaccatgcccagcgcctccagttgcggggggaccatcagtcttcctgttccccccaaaacccaaggacactctcatgatctcccggacccctgaggtcacgtgcgtggtggtggacgtgagccaggaagaccccgaggtccagttcaactggtacgtggatggcgtggaggtgcataatgccaagacaaagccgcgggaggagcagttcaacagcacgtaccgtgtggtcagcgtcctcaccgtcctgcaccaggactggctgaacggcaaggagtacaagtgcaaggtctccaacaaaggcctcccgtcatcgatcgagaaaaccatctccaaagccaaagggcagccccgagagccacaggtgtacaccctgcccccatcccaggaggagatgaccaagaaccaggtcagcctgacctgcctggtcaaaggcttctaccccagcgacatcgccgtggagtgggagagcaatgggcagccggagaacaactacaagaccacgcctcccgtgctggactccgacggatccttcttcctctacagcaggctaaccgtggacaagagcaggtggcaggaggggaatgtcttctcatgctccgtgatgcatgaggctctgcacaaccactacacacagaagagcctctccctgtctctgggtaaa

SEQ ID NO: 446 - protein, 327 aa, Homo sapiens
ASTKGPSVFPLAPCSRSTSESTAALGCLVKDYFPEPVTVSWNSGALTSGVHTFPAVLQSSGLYSLSSVVTVPSSSLGTKTYTCNVDHKPSNTKVDKRVESKYGPPCPPCPAPPVAGGPSVFLFPPKPKDTLMISRTPEVTCVVVDVSQEDPEVQFNWYVDGVEVHNAKTKPREEQFNSTYRVVSVLTVLHQDWLNGKEYKCKVSNKGLPSSIEKTISKAKGQPREPQVYTLPPSQEEMTKNQVSLTCLVKGFYPSDIAVEWESNGQPENNYKTTPPVLDSDGSFFLYSRLTVDKSRWQEGNVFSCSVMHEALHNHYTQKSLSLSLGK

SEQ ID NO: 447 - DNA, 321 bp, Homo sapiens
cgtacggtggccgctccctccgtgttcatcttcccaccttccgacgagcagctgaagtccggcaccgcttctgtcgtgtgcctgctgaacaacttctacccccgcgaggccaaggtgcagtggaaggtggacaacgccctgcagtccggcaactcccaggaatccgtgaccgagcaggactccaaggacagcacctactccctgtcctccaccctgaccctgtccaaggccgactacgagaagcacaaggtgtacgcctgcgaagtgacccaccagggcctgtctagccccgtgaccaagtctttcaaccggggcgagtgt

SEQ ID NO: 448 - protein, 107 aa, Homo sapiens [sequence omitted]

SEQ ID NO: 449 - DNA, 321 bp, Homo sapiens
cgaactgtggctgcaccatctgtcttcatcttcccgccatctgatgagcagttgaaatctggaactgcctctgttgtgtgcctgctgaataacttctatcccagagaggccaaagtacagtggaaggtggataacgccctccaatcgggtaactcccaggagagtgtcacagagcaggagagcaaggacagcacctacagcctcagcagcaccctgacgctgagcaaagcagactacgagaaacacaaagtctacgccggcgaagtcacccatcagggcctgagctcgcccgtcacaaagagcttcaacaggggagagtgt

SEQ ID NO: 450 - protein, 107 aa, Homo sapiens
RTVAAPSVFIFPPSDEQLKSGTASVVCLLNNFYPREAKVQWKVDNALQSGNSQESVTEQESKDSTYSLSSTLTLSKADYEKHKVYAGEVTHQGLSSPVTKSFNRGEC

SEQ ID NO: 451 - DNA, 321 bp, Homo sapiens
cgaactgtggctgcaccatctgtcttcatcttcccgccatctgatgagcagttgaaatctggaactgcctctgttgtgtgcctgctgaataacttctatcccagagaggccaaagtacagcggaaggtggataacgccctccaatcgggtaactcccaggagagtgtcacagagcaggagagcaaggacagcacctacagcctcagcagcaccctgacgctgagcaaagcagactacgagaaacacaaagtctacgcctgcgaagtcacccatcagggcctgagctcgcccgtcacaaagagcttcaacaggggagagtgt

SEQ ID NO: 452 - protein, 107 aa, Homo sapiens
RTVAAPSVFIFPPSDEQLKSGTASVVCLLNNFYPREAKVQRKVDNALQSGNSQESVTEQESKDSTYSLSSTLTLSKADYEKHKVYACEVTHQGLSSPVTKSFNRGEC

SEQ ID NO: 453 - DNA, 321 bp, Homo sapiens
cgaactgtggctgcaccatctgtcttcatcttcccgccatctgatgagcagttgaaatctggaactgcctctgttgtgtgcctgctgaataacttctatcccagagaggccaaagtacagtggaaggtggataacgccctccaatcgggtaactcccaggagagtgtcacagagcaggacagcaaggacagcacctacagcctcagcagcaccctgacgctgagcaaagcagactacgagaaacacaaactctacgcctgcgaagtcacccatcagggcctgagctcgcccgtcacaaagagcttcaacaggggagagtgt

SEQ ID NO: 454 - protein, 107 aa, Homo sapiens
RTVAAPSVFIFPPSDEQLKSGTASVVCLLNNFYPREAKVQWKVDNALQSGNSQESVTEQDSKDSTYSLSSTLTLSKADYEKHKLYACEVTHQGLSSPVTKSFNRGEC

SEQ ID NO: 455 - DNA, 321 bp, Homo sapiens
cgaactgtggctgcaccatctgtcttcatcttcccgccatctgatgagcagttgaaatctggaactgcctctgttgtgtgcctgctgaataacttctatcccagagaggccaaagtacagtggaaggtggataacgccctccaatcgggtaactcccaggagagtgtcacagagcaggacagcaaggacagcacctacagcctcagcaacaccctgacgctgagcaaagcagactacgagaaacacaaagtctacgcctgcgaagtcacccatcagggcctgagctcgcccgtcacaaagagcttcaacaggggagagtgc

SEQ ID NO: 456 - protein, 107 aa, Homo sapiens
RTVAAPSVFIFPPSDEQLKSGTASVVCLLNNFYPREAKVQWKVDNALQSGNSQESVTEQDSKDSTYSLSNTLTLSKADYEKHKVYACEVTHQGLSSPVTKSFNRGEC

SEQ ID NO: 457 - DNA, 312 bp, Homo sapiens
cccaaggccaaccccacggtcactctgttcccgccctcctctgaggagctccaagccaacaaggccacactagtgtgtctgatcagtgacttctacccgggagctgtgacagtggcttggaaggcagatggcagccccgtcaaggcgggagtggagacgaccaaaccctccaaacagagcaacaacaagtacgcggccagcagctacctgagcctgacgcccgagcagtggaagtcccacagaagctacagctgccaggtcacgcatgaagggagcaccgtggagaagacagtggcccctacagaatgttca

SEQ ID NO: 458 - protein, 104 aa, Homo sapiens
PKANPTVTLFPPSSEELQANKATLVCLISDFYPGAVTVAWKADGSPVKAGVETTKPSKQSNNKYAASSYLSLTPEQWKSHRSYSCQVTHEGSTVEKTVAPTECS

SEQ ID NO: 459 - DNA, 318 bp, Homo sapiens
ggtcagcccaaggccaaccccactgtcactctgttcccgccctcctctgaggagctccaagccaacaaggccacactagtgtgtctgatcagtgacttctacccgggagctgtgacagtggcctggaaggcagatggcagccccgtcaaggcgggagtggagaccaccaaaccctccaaacagagcaacaacaagtacgcggccagcagctacctgagcctgacgcccgagcagtggaagtcccacagaagctacagctgccaggtcacgcatgaagggagcaccgtggagaagacagtggcccctacagaatgttca

SEQ ID NO: 460 - DNA, 318 bp, Homo sapiens; identical to SEQ ID NO: 459

SEQ ID NO: 461 - protein, 106 aa, Homo sapiens
GQPKANPTVTLFPPSSEELQANKATLVCLISDFYPGAVTVAWKADGSPVKAGVETTKPSKQSNNKYAASSYLSLTPEQWKSHRSYSCQVTHEGSTVEKTVAPTECS

SEQ ID NO: 462 - DNA, 318 bp, Homo sapiens
ggccagcctaaggccgctccttctgtgaccctgttccccccatcctccgaggaactgcaggctaacaaggccaccctcgtgtgcctgatcagcgacttctaccctggcgccgtgaccgtggcctggaaggctgatagctctcctgtgaaggccggcgtggaaaccaccaccccttccaagcagtccaacaacaaatacgccgcctcctcctacctgtccctgacccctgagcagtggaagtcccaccggtcctacagctgccaagtgacccacgagggctccaccgtggaaaagaccgtggctcctaccgagtgctcc

SEQ ID NO: 463 - DNA, 318 bp, Homo sapiens
ggccagcctaaagctgcccccagcgtcaccctgtttcctccctccagcgaggagctccaggccaacaaggccaccctcgtgtgcctgatctccgacttctatcccggcgctgtgaccgtggcttggaaagccgactccagccctgtcaaagccggcgtggagaccaccacaccctccaagcagtccaacaacaagtacgccgcctccagctatctctccctgacccctgagcagtggaagtcccaccggtcctactcctgtcaggtgacccacgagggctccaccgtggaaaagaccgtcgcccccaccgagtgctcc

SEQ ID NO: 464 - protein, 106 aa, Homo sapiens
GQPKAAPSVTLFPPSSEELQANKATLVCLISDFYPGAVTVAWKADSSPVKAGVETTTPSKQSNNKYAASSYLSLTPEQWKSHRSYSCQVTHEGSTVEKTVAPTECS

SEQ ID NO: 465 - DNA, 318 bp, Homo sapiens
ggtcagcccaaggctgccccctcggtcactctgttcccgccctcctctgaggagcttcaagccaacaaggccacactggtgtgtctcataagtgacttctacccgggagccgtgacagtggcctggaaggcagatagcagccccgtcaaggcgggagtggagaccaccacaccctccaaacaaagcaacaacaagtacgcggccagcagctatctgagcctgacgcctgagcagtggaagtcccacagaagctacagctgccaggtcacgcatgaagggagcaccgtggagaagacagtggcccctacagaatgttca

SEQ ID NO: 466 - skipped

SEQ ID NO: 467 - protein, 106 aa, Homo sapiens; identical to SEQ ID NO: 464

SEQ ID NO: 468 - DNA, 312 bp, Homo sapiens
cccaaggctgccccctcggtcactctgttcccaccctcctctgaggagcttcaagccaacaaggccacactggtgtgtctcataagtgacttctacccgggagccgtgacagttgcctggaaggcagatagcagccccgtcaaggcgggggtggagaccaccacaccctccaaacaaagcaacaacaagtacgcggccagcagctacctgagcctgacgcctgagcagtggaagtcccacaaaagctacagctgccaggtcacgcatgaagggagcaccgtggagaagacagttgcccctacggaatgttca

SEQ ID NO: 469 - protein, 104 aa, Homo sapiens
PKAAPSVTLFPPSSEELQANKATLVCLISDFYPGAVTVAWKADSSPVKAGVETTTPSKQSNNKYAASSYLSLTPEQWKSHKSYSCQVTHEGSTVEKTVAPTECS

SEQ ID NO: 470 - DNA, 318 bp, Homo sapiens
ggtcagcccaaggctgccccctcggtcactctgttcccaccctcctctgaggagcttcaagccaacaaggccacactggtgtgtctcataagtgacttctacccggggccagtgacagttgcctggaaggcagatagcagccccgtcaaggcgggggtggagaccaccacaccctccaaacaaagcaacaacaagtacgcggccagcagctacctgagcctgacgcctgagcagtggaagtcccacaaaagctacagctgccaggtcacgcatgaagggagcaccgtggagaagacagtggcccctacggaatgttca

SEQ ID NO: 471 - protein, 106 aa, Homo sapiens
GQPKAAPSVTLFPPSSEELQANKATLVCLISDFYPGPVTVAWKADSSPVKAGVETTTPSKQSNNKYAASSYLSLTPEQWKSHKSYSCQVTHEGSTVEKTVAPTECS

SEQ ID NO: 472 - DNA, 318 bp, Homo sapiens
ggtcagcccaaggctgccccctcggtcactctgttcccaccctcctctgaggagcttcaagccaacaaggccacactggtgtgtctcataagtgacttctacccgggagccgtgacagtggcctggaaggcagatagcagccccgtcaaggcgggagtggagaccaccacaccctccaaacaaagcaacaacaagtacgcggccagcagctacctgagcctgacgcctgagcagtggaagtcccacaaaagctacagctgccaggtcacgcatgaagggagcaccgtggagaagacagtggcccctacagaatgttca

SEQ ID NO: 473 - protein, 106 aa, Homo sapiens
GQPKAAPSVTLFPPSSEELQANKATLVCLISDFYPGAVTVAWKADSSPVKAGVETTTPSKQSNNKYAASSYLSLTPEQWKSHKSYSCQVTHEGSTVEKTVAPTECS

SEQ ID NO: 474 - DNA, 318 bp, Homo sapiens
ggtcagcccaaggctgccccctcggtcactctgttcccgccctcctctgaggagcttcaagccaacaaggccacactggtgtgtctcataagtgacttctacccgggagccgtgacagtggcctggaaggcagatagcagccccgtcaaggcgggagtggagaccaccacaccctccaaacaaagcaacaacaagtacgcggccagcagctacctgagcctgacgcctgagcagtggaagtcccacagaagctacagctgccaggtcacgcatgaagggagcaccgtggagaagacagtggcccctacagaatgttca

SEQ ID NO: 475 - protein, 106 aa, Homo sapiens; identical to SEQ ID NO: 464

SEQ ID NO: 476 - DNA, 318 bp, Homo sapiens
ggtcagcccaaggctgccccatcggtcactctgttcccgccctcctctgaggagcttcaagccaacaaggccacactggtgtgcctgatcagtgacttctacccgggagctgtgaaagtggcctggaaggcagatggcagccccgtcaacacgggagtggagaccaccacaccctccaaacagagcaacaacaagtacgcggccagcagctacctgagcctgacgcctgagcagtggaagtcccacagaagctacagctgccaggtcacgcatgaagggagcaccgtggagaagacagtggcccctgcagaatgttca

SEQ ID NO: 477 - protein, 106 aa, Homo sapiens
GQPKAAPSVTLFPPSSEELQANKATLVCLISDFYPGAVKVAWKADGSPVNTGVETTTPSKQSNNKYAASSYLSLTPEQWKSHRSYSCQVTHEGSTVEKTVAPAECS

SEQ ID NO: 478 - DNA, 318 bp, Homo sapiens
ggtcagcccaaggctgccccatcggtcactctgttcccaccctcctctgaggagcttcaagccaacaaggccacactggtgtgtctcgtaagtgacttctacccgggagccgtgacagtggcctggaaggcagatggcagccccgtcaaggtgggagtggagaccaccaaaccctccaaacaaagcaacaacaagtatgcggccagcagctacctgagcctgacgcccgagcagtggaagtcccacagaagctacagctgccgggtcacgcatgaagggagcaccgtggagaagacagtggcccctgcagaatgctct

SEQ ID NO: 479 - protein, 106 aa, Homo sapiens
GQPKAAPSVTLFPPSSEELQANKATLVCLVSDFYPGAVTVAWKADGSPVKVGVETTKPSKQSNNKYAASSYLSLTPEQWKSHRSYSCRVTHEGSTVEKTVAPAECS

SEQ ID NO: 480 - DNA, 318 bp, Homo sapiens
ggtcagcccaaggctgccccctcggtcactctgttcccaccctcctctgaggagcttcaagccaacaaggccacactggtgtgtctcgtaagtgacttcaacccgggagccgtgacagtggcctggaaggcagatggcagccccgtcaaggtgggagtggagaccaccaaaccctccaaacaaagcaacaacaagtatgcggccagcagctacctgagcctgacgcccgagcagtggaagtcccacagaagctacagctgccgggtcacgcatgaagggagcaccgtggagaagacagtggcccctgcagaatgctct

SEQ ID NO: 481 - protein, 106 aa, Homo sapiens
GQPKAAPSVTLFPPSSEELQANKATLVCLVSDFNPGAVTVAWKADGSPVKVGVETTKPSKQSNNKYAASSYLSLTPEQWKSHRSYSCRVTHEGSTVEKTVAPAECS

SEQ ID NO: 482 - DNA, 978 bp, Homo sapiens
gcttctaccaagggacccagcgtgttccctctggctccttgctccagatccacctccgagtctacagctgctctgggctgcctggtcaaggactactttcctgagcctgtgaccgtgtcttggaactctggcgctctgacatctggcgtgcacacattccctgctgtgctgcagtcctccggcctgtactctctgtcctctgtcgtgaccgtgccttcctctagcctgggcaccaagacctacacctgtaatgtggaccacaagccttccaacaccaaggtggacaagcgcgtggaatctaagtacggccctccttgtcctccatgtcctgctccagagtttgaaggcggcccttccgtgtttctgttccctccaaagcctaaggacaccctgatgatctctcggacccctgaagtgacctgcgtggtggtggatgtgtcccaagaggatcccgaggtgcagttcaattggtacgtggacggcgtggaagtgcacaacgccaagaccaagcctagagaggaacagttcaactccacctacagagtggtgtccgtgctgaccgtgctgcaccaggattggctgaacggcaaagagtacaagtgcaaggtgtccaacaagggcctgcctagctccatcgaaaagaccatctccaaggccaagggccagcctcgagaaccccaggtttacaccctgcctccaagccaagaggaaatgaccaagaaccaggtgtccctgacctgcctcgtgaagggattctacccctccgatatcgccgtggaatgggagtctaatggccagccagagaacaactacaagacaacccctcctgtgctggactccgacggctccttctttctgtattcccgcctgaccgtggacaagtccagatggcaagagggcaacgtgttctcctgcagcgtgatgcacgaggccctgcacaatcactacacccagaagtccctgtctctgtccctgggc

SEQ ID NO: 483 - protein, 326 aa, Homo sapiens
ASTKGPSVFPLAPCSRSTSESTAALGCLVKDYFPEPVTVSWNSGALTSGVHTFPAVLQSSGLYSLSSVVTVPSSSLGTKTYTCNVDHKPSNTKVDKRVESKYGPPCPPCPAPEFEGGPSVFLFPPKPKDTLMISRTPEVTCVVVDVSQEDPEVQFNWYVDGVEVHNAKTKPREEQFNSTYRVVSVLTVLHQDWLNGKEYKCKVSNKGLPSSIEKTISKAKGQPREPQVYTLPPSQEEMTKNQVSLTCLVKGFYPSDIAVEWESNGQPENNYKTTPPVLDSDGSFFLYSRLTVDKSRWQEGNVFSCSVMHEALHNHYTQKSLSLSLG

SEQ ID NO: 484 - protein, 353 aa, Homo sapiens
ASPTSPKVFPLSLCSTQPDGNVVIACLVQGFFPQEPLSVTWSESGQGVTARNFPPSQDASGDLYTTSSQLTLPATQCLAGKSVTCHVKHYTNPSQDVTVPCPVPSTPPTPSPSTPPTPSPSCCHPRLSLHRPALEDLLLGSEANLTCTLTGLRDASGVTFTWTPSSGKSAVQGPPERDLCGCYSVSSVLPGCAEPWNHGKTFTCTAAYPESKTPLTATLSKSGNTFRPEVHLLPPPSEELALNELVTLTCLARGFSPKDVLVRWLQGSQELPREKYLTWASRQEPSQGTTTFAVTSILRVAAEDWKKGDTFSCMVGHEALPLAFTQKTIDRLAGKPTHVNVSVVMAEVDGTCY

SEQ ID NO: 485 - protein, 340 aa, Homo sapiens
ASPTSPKVFPLSLDSTPQDGNVVVACLVQGFFPQEPLSVTWSESGQNVTARNFPPSQDASGDLYTTSSQLTLPATQCPDGKSVTCHVKHYTNSSQDVTVPCRVPPPPPCCHPRLSLHRPALEDLLLGSEANLTCTLTGLRDASGATFTWTPSSGKSAVQGPPERDLCGCYSVSSVLPGCAQPWNHGETFTCTAAHPELKTPLTANITKSGNTFRPEVHLLPPPSEELALNELVTLTCLARGFSPKDVLVRWLQGSQELPREKYLTWASRQEPSQGTTTYAVTSILRVAAEDWKKGETFSCMVGHEALPLAFTQKTIDRMAGKPTHINVSVVMAEADGTCY

SEQ ID NO: 486 - DNA, 369 bp, Homo sapiens
cagctgcagctgcaggagtcgggcccaggactggtgaagccttcggagaccctgtccctcacctgcactgtctctggtggctccatcagcagtagtagttactactggggctggatccgccagcccccagggaaggggctggagtggattgggagtatctattatagtgggagcatttactacaacccgtccctcaagagtcgagtcaccatatccgttgacacgtccaagaaccagttctccctgaagctgagctctgtgaccgccgcagacacggctgtgtattactgtgcgagctggttcggggagttcttgaaagccgatgcttttgatatctggggccaagggacaatggtcaccgtctcttca

SEQ ID NO: 487 - protein, 123 aa, Homo sapiens
QLQLQESGPGLVKPSETLSLTCTVSGGSISSSSYYWGWIRQPPGKGLEWIGSIYYSGSIYYNPSLKSRVTISVDTSKNQFSLKLSSVTAADTAVYYCASWFGEFLKADAFDIWGQGTMVTVSS

SEQ ID NO: 488 - protein, 10 aa, Homo sapiens
GGSISSSSYY

SEQ ID NO: 489 - protein, 7 aa, Homo sapiens
IYYSGSI

SEQ ID NO: 490 - protein, 15 aa, Homo sapiens
ASWFGEFLKADAFDI

SEQ ID NO: 491 - DNA, 333 bp, Homo sapiens
cagtctgccctgactcagcctgcctccgtgtctgggtctcctggacagtcgatcaccatctcctgcactggaaccagcagtgatgttggtggttatagctatgtctcctggtaccaacagcacccaggcaaagcccccaaactcatgatttatgatgtcagtaagcggccctcaggggtttctaatcgcttctctggctccaagtctggcaacacggcctccctgacaatctctgggctccaggctgaggacgaggctgattattactgctgctcatatgcaggtggtagcactttcgtggtattcggcggagggaccaagctgaccgtccta

SEQ ID NO: 492 - protein, 111 aa, Homo sapiens
QSALTQPASVSGSPGQSITISCTGTSSDVGGYSYVSWYQQHPGKAPKLMIYDVSKRPSGVSNRFSGSKSGNTASLTISGLQAEDEADYYCCSYAGGSTFVVFGGGTKLTVL

SEQ ID NO: 493 - protein, 9 aa, Homo sapiens
SSDVGGYSY

SEQ ID NO: 494 - protein, 11 aa, Homo sapiens
CSYAGGSTFVV

SEQ ID NO: 495 - DNA, 366 bp, Homo sapiens
caggtgcagctgcaggagtcgggcccaggactggtgaagccttcggggaccctgtccctcacctgcgctgtctctggtggctccatcagcacaactaattggtggagttgggtccgccagtccccagggagggggctggagtggattggggaaatctttcatattggatataccaactacaacccgtccctcaagagtcgagtcaccatatcagtagacaagtccaagaaccaattctccctgaagctgaattccgtgaccgtcgcggacacggccgtgtattactgtgcgagaagagtggtcatggacacagctatggcccactttgactgctggggccagggaaccctggtcaccgtctcctca

SEQ ID NO: 496 - protein, 122 aa, Homo sapiens
QVQLQESGPGLVKPSGTLSLTCAVSGGSISTTNWWSWVRQSPGRGLEWIGEIFHIGYTNYNPSLKSRVTISVDKSKNQFSLKLNSVTVADTAVYYCARRVVMDTAMAHFDCWGQGTLVTVSS

SEQ ID NO: 497 - protein, 9 aa, Homo sapiens
GGSISTTNW

SEQ ID NO: 498 - protein, 7 aa, Homo sapiens
IFHIGYT

SEQ ID NO: 499 - protein, 15 aa, Homo sapiens
ARRVVMDTAMAHFDC

SEQ ID NO: 500 - DNA, 333 bp, Homo sapiens
cagtctgtgctgacgcagccgccctcagtgtctggggccccagggcagagggtcaccatctcctgcactgggagcagctccaacatcggggcaggttatgatgtacactggtaccagcaccttccaggaacagcccccaaactcctcatctatattaacatcaatcggccctcaggggtccctgaccgattctctggctccaagtctggcacctcagcctccctggtcatcgctgggctccaggctgaagatggggctgattattactgccagtcctatgacagcagtctgagtggttgggtgttcggcggggggaccaggctgaccgtccta

SEQ ID NO: 501 - protein, 111 aa, Homo sapiens
QSVLTQPPSVSGAPGQRVTISCTGSSSNIGAGYDVHWYQHLPGTAPKLLIYININRPSGVPDRFSGSKSGTSASLVIAGLQAEDGADYYCQSYDSSLSGWVFGGGTRLTVL

SEQ ID NO: 502 - protein, 9 aa, Homo sapiens
SSNIGAGYD

SEQ ID NO: 503 - skipped

SEQ ID NO: 504 - protein, 11 aa, Homo sapiens
QSYDSSLSGWV

SEQ ID NO: 505 - DNA, 351 bp, Homo sapiens
gaggtgcagatggtggagtctggaggaggcttgatccagccgggggggtccctgagactctcctgtgcagcctctgggctcaccgtcagtagtaattacatgagctgggtccgccaggctccagggaaggggctggagtgggtctcagttatttatagcggtggtagcacattctacgcagactccgtgaaggaccgattcaccatctccagggacaattccaagaacacgctgtatcttcaaatgaacagcctgagagccgaagacacggccgtatattactgtgcgcgagaaaactggaactacgtttttgactgctggggccagggaaccctggtcaccgtctcctca

SEQ ID NO: 506 - protein, 117 aa, Homo sapiens
EVQMVESGGGLIQPGGSLRLSCAASGLTVSSNYMSWVRQAPGKGLEWVSVIYSGGSTFYADSVKDRFTISRDNSKNTLYLQMNSLRAEDTAVYYCARENWNYVFDCWGQGTLVTVSS

SEQ ID NO: 507 - protein, 11 aa, Homo sapiens
ARENWNYVFDC

SEQ ID NO: 508 - DNA, 321 bp, Homo sapiens
gacatccagttgacccagtctccatccttcctgtctgcatctgtaggagacagagtcaccatcacttgctgggccagtcagggcattagcagttatttagcctggtatcagcaaaaaccagggaaagcccctaagctcctgatctatgctgcatccactttgcaaagtggggtcccatcaaggttcagcggcagtggatctgggacagaattcactctcacaatcagcagcctgcagcctgaagattttgcaacttattactgtcaacagcttaatagtcaccctatcatcttcggccaagggacacgactggagattaaa

SEQ ID NO: 509 - protein, 107 aa, Homo sapiens
DIQLTQSPSFLSASVGDRVTITCWASQGISSYLAWYQQKPGKAPKLLIYAASTLQSGVPSRFSGSGSGTEFTLTISSLQPEDFATYYCQQLNSHPIIFGQGTRLEIK

SEQ ID NO: 510 - protein, 9 aa, Homo sapiens
QQLNSHPII

SEQ ID NO: 511 - DNA, 345 bp, Homo sapiens
gaggtgcaggtggtagaatctggaggaggcttgatccagccgggggggtccctgagactctcctgtgcagcctctggaatcaccgtcagtagaaactacatgaactgggtccgccaggctccagggaaggggctggagtgggtctcagttatttatagcggtggtagcacattctacgcagactccgtgaagggccgattcaccatctccagagacaattccaagaacacgctgtatcttcaaatgaacagcctgagagccgatgacacgggcgtgtattactgtgcgagagaagggtacggtatggacgtctggggccaagggaccacggtcaccgtctcctca

SEQ ID NO: 512 - protein, 115 aa, Homo sapiens
EVQVVESGGGLIQPGGSLRLSCAASGITVSRNYMNWVRQAPGKGLEWVSVIYSGGSTFYADSVKGRFTISRDNSKNTLYLQMNSLRADDTGVYYCAREGYGMDVWGQGTTVTVSS

SEQ ID NO: 513 - protein, 8 aa, Homo sapiens
GITVSRNY

SEQ ID NO: 514 - protein, 9 aa, Homo sapiens
AREGYGMDV

SEQ ID NO: 515 - DNA, 321 bp, Homo sapiens
gacatccagttgacccagtctccatccttcctgtctgcatctgtaggagacagagtcaccatcacttgctgggccagtcagggcattagcagttatttagcctggtatcagcaaaaaccagggaaagcccctaagctcctgatttattctgcatccactttgcaaagtggggtcccatcaaggttcagcggcagtggatctgggacagaattcactctcacaatcaacagcctgcagcctgaagattttgcaacttattattgtcaacagcttaatagtcacccgtgcagttttggccaggggaccaagctggagatcaaa

SEQ ID NO: 516 - protein, 107 aa, Homo sapiens
DIQLTQSPSFLSASVGDRVTITCWASQGISSYLAWYQQKPGKAPKLLIYSASTLQSGVPSRFSGSGSGTEFTLTINSLQPEDFATYYCQQLNSHPCSFGQGTKLEIK

SEQ ID NO: 517 - skipped

SEQ ID NO: 518 - protein, 9 aa, Homo sapiens
QQLNSHPCS

SEQ ID NO: 519 - DNA, 351 bp, Homo sapiens
gaggtgcagctggtggagtctggaggaggcctgatccagcctggggggtccctgagactctcctgtgcagcctctgaattcatcgtcagtcgcaactacatgagttgggtccgccaggctccagggaaggggctggaatgggtctcagttatttatagcggtggtagcacattctacgcagactccgtgaggggccgattcaccatctccagagacaattccaaaaacacgctgtatcttcaaatgaacagcctgagagccgaggacacggccgtgtattactgtgcgagagactacggtgaccagtactttgactactggggccagggaaccctggtcaccgtctcctca

SEQ ID NO: 520 - protein, 117 aa, Homo sapiens
EVQLVESGGGLIQPGGSLRLSCAASEFIVSRNYMSWVRQAPGKGLEWVSVIYSGGSTFYADSVRGRFTISRDNSKNTLYLQMNSLRAEDTAVYYCARDYGDQYFDYWGQGTLVTVSS

SEQ ID NO: 521 - protein, 8 aa, Homo sapiens
EFIVSRNY

SEQ ID NO: 522 - protein, 11 aa, Homo sapiens
ARDYGDQYFDY

SEQ ID NO: 523 - DNA, 321 bp, Homo sapiens
gaaatggtgatgacgcagtctccagccaccctgtctgtgtctccaggggaaaaagccaccctctcctgcagggccagtcagactgttagcaccaacttagcctggtaccaacagaaacctggccagtctcccaggctcctcatctatggtgcatccaccagggccactggtatcccagccaggttcagtggcagtgggtctgggacagagttcactctcaccatcagcagcctgcagtctgaagattttgcaatttattactgtcagcaatatgttgactggcctcggacgttcggccaagggaccacggtggaaatcaaa

SEQ ID NO: 524 - protein, 107 aa, Homo sapiens
EMVMTQSPATLSVSPGEKATLSCRASQTVSTNLAWYQQKPGQSPRLLIYGASTRATGIPARFSGSGSGTEFTLTISSLQSEDFAIYYCQQYVDWPRTFGQGTTVEIK

SEQ ID NO: 525 - protein, 6 aa, Homo sapiens
QTVSTN

SEQ ID NO: 526 - protein, 9 aa, Homo sapiens
QQYVDWPRT

SEQ ID NO: 527 - DNA, 351 bp, Homo sapiens
gaggtgcagatggtggagtctggaggaggcttgatccagtctggggggtccctgagactctcctgtgcagcctctgggctcagcgtcagtagcaactacatgagttgggtccgccaggctccagggaaggggctggaatgggtcgcagttatttatagcggtggtagtatattctatgcagactccgtgaaggaccgattcaccatctccagggacaattccaagaacacgctttatcttcaaatgaacagcctgagagccgaggacacggccgtatattactgtgcgagagagaactggaactacgtttttgactgctggggccagggaaccctggtcaccgtctcctca

SEQ ID NO: 528 - protein, 117 aa, Homo sapiens
EVQMVESGGGLIQSGGSLRLSCAASGLSVSSNYMSWVRQAPGKGLEWVAVIYSGGSIFYADSVKDRFTISRDNSKNTLYLQMNSLRAEDTAVYYCARENWNYVFDCWGQGTLVTVSS

SEQ ID NO: 529 - protein, 8 aa, Homo sapiens
GLSVSSNY

SEQ ID NO: 530 - protein, 7 aa, Homo sapiens
IYSGGSI

SEQ ID NO: 531 - DNA, 321 bp, Homo sapiens
gacatccagttgacccagtctccatccttcctgtctgcatctgttggagacagagtcaccatcacttgctgggccagtcagggcattagcacttatttagcctggtatcagcaaaaaccagggaaagcccctaagctcctgatctatgctgcatccactttgcaaagtggggtcccatcaaggttcagcggcagtggatctgggacagaattcactctcacaatcagcagcctgcagcctgaagattttgcaacttattactgtcaacagcttagtagtcaccctatcatcttcggccaagggacacgactggagattaaa

SEQ ID NO: 532 - protein, 107 aa, Homo sapiens
DIQLTQSPSFLSASVGDRVTITCWASQGISTYLAWYQQKPGKAPKLLIYAASTLQSGVPSRFSGSGSGTEFTLTISSLQPEDFATYYCQQLSSHPIIFGQGTRLEIK

SEQ ID NO: 533 - protein, 9 aa, Homo sapiens
QQLSSHPII

SEQ ID NO: 534 - DNA, 390 bp, Homo sapiens
caggtgcagctggtggaatctgggggaggcgtggtccaccctgggaggtccctgagactctcctgtgtagtctctggattcaccttcagtggctatggcatgtactgggtccgccaggctccaggcaaggggctggagtgggtggcagtcatatcaaaggatggaagtgataaatactatgcagactccgtgaagggccgattcaccatttccagagacaattccaagaacacactgaatctgcaaatgaacagcctgagagctgaggacacggctgtgttttactgtgcgaaagaaaggactttccaaggttcggggagttattataacaactacttttattatggtatggacgtctggggccaagggaccacggtcaccgtctcctca

SEQ ID NO: 535 - protein, 130 aa, Homo sapiens
QVQLVESGGGVVHPGRSLRLSCVVSGFTFSGYGMYWVRQAPGKGLEWVAVISKDGSDKYYADSVKGRFTISRDNSKNTLNLQMNSLRAEDTAVFYCAKERTFQGSGSYYNNYFYYGMDVWGQGTTVTVSS

SEQ ID NO: 536 - protein, 8 aa, Homo sapiens
GFTFSGYG

SEQ ID NO: 537 - protein, 8 aa, Homo sapiens
ISKDGSDK

SEQ ID NO: 538 - protein, 23 aa, Homo sapiens
AKERTFQGSGSYYNNYFYYGMDV

SEQ ID NO: 539 - DNA, 321 bp, Homo sapiens
gccatccagttgacccagtctccatcctccctgtctgcatctgtaggagacagagtcaccatcacttgccgggcaagtcagggcattagcagtgctttagcctggtatcagcagaaaccagggaaagctcctaacctcctgatctatgatgcctccagtttggaaagtggggtcccatcaaggttcagcggcagtggatttgggacagatttcactctcaccatcaacagcctgcagcctgaagattttgcaagttattattgtcaacagtttaagagttatccgctcactttcggcggagggaccaaggtggagatcaag

SEQ ID NO: 540 - protein, 107 aa, Homo sapiens
AIQLTQSPSSLSASVGDRVTITCRASQGISSALAWYQQKPGKAPNLLIYDASSLESGVPSRFSGSGFGTDFTLTINSLQPEDFASYYCQQFKSYPLTFGGGTKVEIK

SEQ ID NO: 541 - protein, 6 aa, Homo sapiens
QGISSA

SEQ ID NO: 542 - protein, 9 aa, Homo sapiens
QQFKSYPLT

SEQ ID NO: 543 - DNA, 345 bp, Homo sapiens
gaggtgcagctggtggagtctggaggaggcttgatccagcctggggggtccctgagactctcctgtggagtctcaggactcaccgtcagtagaaactatatgaattgggtccgccaggctccagggaaggggctggagtgggtctcagttatttatagcggtggtagcacattctacgcagactccgtgaagggccgattcaccatctccagagacaactccaaaaacacgctgtatcttcaaatgatcagcctgagagccgaggactcgggcgtgtattactgtgcgcgagaaggatttggtatggacgtctggggccaagggaccacggtcaccgtctcctca

SEQ ID NO: 544 - protein, 115 aa, Homo sapiens
EVQLVESGGGLIQPGGSLRLSCGVSGLTVSRNYMNWVRQAPGKGLEWVSVIYSGGSTFYADSVKGRFTISRDNSKNTLYLQMISLRAEDSGVYYCAREGFGMDVWGQGTTVTVSS

SEQ ID NO: 545 - protein, 8 aa, Homo sapiens
GLTVSRNY

SEQ ID NO: 546 - protein, 9 aa, Homo sapiens
AREGFGMDV

SEQ ID NO: 547 - DNA, 321 bp, Homo sapiens
gacatccagttgacccagtctccatccttcctgtctgcatctgtaggagacagagtcaccatcacttgctgggccagtcagggcattagcaattatttagcctggtatcagcaaaaaccagggaaagcccctaagctcctgatctattctgcatccactttgcaaagtggggtcccatcaaggttcagcggcagtggatctgggacagaattcactctcacaatcagcaacctgcagcctgcagatattgcaacttattactgtcaactccttaatagtcatccgtgcagttttggccaggggaccaagctggagatcaaa

SEQ ID NO: 548 - protein, 107 aa, Homo sapiens
DIQLTQSPSFLSASVGDRVTITCWASQGISNYLAWYQQKPGKAPKLLIYSASTLQSGVPSRFSGSGSGTEFTLTISNLQPADIATYYCQLLNSHPCSFGQGTKLEIK

SEQ ID NO: 549 - protein, 6 aa, Homo sapiens
QGISNY

SEQ ID NO: 550 - protein, 9 aa, Homo sapiens
QLLNSHPCS

SEQ ID NO: 551 - DNA, 381 bp, Homo sapiens
caggtgcagctggcggagtctgggggaggcgtggtccagcctgggaggtccctgagactctcctgtgtagtctctggattcaccttcagtaactatggcatgcactgggtccgccaggctccaggcaagggcctggagtgggtggtatttatatcaaatgatggaagtaatgaagactttgtagactccgtgaagggccgattcaccatctccagagacaattccaagaacacgctgtatctgcaaatgaacagcctgagagctgaggacacggctgtgtattactgtgcgaaaggagggtatttctatggttcggggaattattactactactacggtatggacgtctggggccaagggaccacggtcaccgtctcctca

SEQ ID NO: 552 - protein, 127 aa, Homo sapiens
QVQLAESGGGVVQPGRSLRLSCVVSGFTFSNYGMHWVRQAPGKGLEWVVFISNDGSNEDFVDSVKGRFTISRDNSKNTLYLQMNSLRAEDTAVYYCAKGGYFYGSGNYYYYYGMDVWGQGTTVTVSS

SEQ ID NO: 553 - protein, 8 aa, Homo sapiens
GFTFSNYG

SEQ ID NO: 554 - protein, 8 aa, Homo sapiens
ISNDGSNE

SEQ ID NO: 555 - protein, 20 aa, Homo sapiens
AKGGYFYGSGNYYYYYGMDV

SEQ ID NO: 556 - DNA, 333 bp, Homo sapiens
cagcctgtgctgactcaatcatcctctgcctctgcttccctgggatcctcggtcaagctcacctgcactctgagcagtgtgcacagtaaccacatcatcgcatggcatcagcagcagccagggaaggcccctcggtacttgatgaagcttgaaggtagtggaaggtacagtaaggggagcggagttcctgatcgcttctcaggctccagctctgaggctgaccgctacctcaccatctccaacctccagtctgaggatgaggctgattattactgtgagacctgggacaataatacttatgtcttcggatctgggaccaaagtcaccgtccta

SEQ ID NO: 557 - protein, 111 aa, Homo sapiens
QPVLTQSSSASASLGSSVKLTCTLSSVHSNHIIAWHQQQPGKAPRYLMKLEGSGRYSKGSGVPDRFSGSSSEADRYLTISNLQSEDEADYYCETWDNNTYVFGSGTKVTVL

SEQ ID NO: 558 - protein, 7 aa, Homo sapiens
SVHSNHI

SEQ ID NO: 559 - protein, 7 aa, Homo sapiens
LEGSGRY

SEQ ID NO: 560 - protein, 9 aa, Homo sapiens
ETWDNNTYV

SEQ ID NO: 561 - DNA, 372 bp, Homo sapiens
gaggtgcagctggtggagtctgggggaggcttgatacagcctggggggtccctgagactctcctgtgcagcctctggattcaccttcagtagctatagcataaactgggtccgccaggctccagggaaggggctggagtgggtttcattcattagtggtagtagtactaccatatactacgcagactctgtgaagggccgattcaccatctccagagacagtgccaagaactcactgtatctgcaaatgaacagcctgagagacgaggacacggctgtgtattactgtgcgagaggcctccgatcgagtatagcacctcgtccggactactttgactcctggggccagggaattttggtcaccgtctcctca

SEQ ID NO: 562 - protein, 124 aa, Homo sapiens
EVQLVESGGGLIQPGGSLRLSCAASGFTFSSYSINWVRQAPGKGLEWVSFISGSSTTIYYADSVKGRFTISRDSAKNSLYLQMNSLRDEDTAVYYCARGLRSSIAPRPDYFDSWGQGILVTVSS

SEQ ID NO: 563 - protein, 8 aa, Homo sapiens
GFTFSSYS

SEQ ID NO: 564 - protein, 8 aa, Homo sapiens
ISGSSTTI

SEQ ID NO: 565 - protein, 17 aa, Homo sapiens
ARGLRSSIAPRPDYFDS

SEQ ID NO: 566 - DNA, 324 bp, Homo sapiens
tcctatgtactgactcagccaccctcagtgtcagtggccccaggaaagacggccaggattacctgtgggggaaacaacattggaagtaaaggtgtacactggtaccagcagaagccaggccaggcccctgtactggtcatctattatgatagcgaccggccctcagggatccctgagcgattctctggctccaactctgggaacacggccaccctgaccatcagcagggtcgaagccggggatgaggccgactattcctgtcaggtgtgggatagtagtagtgatcatccggtattcggcggagggaccaagctgaccgtccaa

SEQ ID NO: 567 - protein, 108 aa, Homo sapiens
SYVLTQPPSVSVAPGKTARITCGGNNIGSKGVHWYQQKPGQAPVLVIYYDSDRPSGIPERFSGSNSGNTATLTISRVEAGDEADYSCQVWDSSSDHPVFGGGTKLTVQ

SEQ ID NO: 568 - skipped

SEQ ID NO: 569 - protein, 11 aa, Homo sapiens
QVWDSSSDHPV

SEQ ID NO: 570 - DNA, 354 bp, Homo sapiens
cagatcaccttgaaggagtctggtcctacgctggtgaaacccacacagaccctcacgctgacctgcaccttctctgggttctcactcagcactggtggagtggctgtgggctggatccgtcagcccccaggaaaggccctggagtggcttgcaatcatttattgggatgatgataagcgttacagcccatctctgaagagcaggctcaccatcaccaaggacacctccaaaaaccaggtggtccttacaatgaccaacatggaccctgtggacacagccacatattactgtgcacactggggaaaagattcttttgatatctggggccaagggacaatggtcaccgtctcttca

SEQ ID NO: 571 - protein, 118 aa, Homo sapiens
QITLKESGPTLVKPTQTLTLTCTFSGFSLSTGGVAVGWIRQPPGKALEWLAIIYWDDDKRYSPSLKSRLTITKDTSKNQVVLTMTNMDPVDTATYYCAHWGKDSFDIWGQGTMVTVSS

SEQ ID NO: 572 - protein, 10 aa, Homo sapiens
GFSLSTGGVA

SEQ ID NO: 573 - protein, 7 aa, Homo sapiens
IYWDDDK

SEQ ID NO: 574 - protein, 10 aa, Homo sapiens
AHWGKDSFDI

SEQ ID NO: 575 - DNA, 321 bp, Homo sapiens
tcctatgagctgacacagccaccctcggtgtcagtgtccccaggacaaacggccaggatcacctgctctggagatgcattgccaagaaaatatgcttattggtaccagcagaagtcaggccaggcccctgtgctggtcatctatgaggacaataaccgaccctccgggatccctgagagattctctggctccagctcagggacaacggccaccttgactgtcagtggggcccaggtggaagatgaagctgactactactgttactcaacagacaccagtggttatgtggtattcggcggagggaccaagttgaccgtccta

SEQ ID NO: 576 - protein, 107 aa, Homo sapiens
SYELTQPPSVSVSPGQTARITCSGDALPRKYAYWYQQKSGQAPVLVIYEDNNRPSGIPERFSGSSSGTTATLTVSGAQVEDEADYYCYSTDTSGYVVFGGGTKLTVL

SEQ ID NO: 577 - protein, 6 aa, Homo sapiens
ALPRKY

SEQ ID NO: 578 - skipped

SEQ ID NO: 579 - protein, 10 aa, Homo sapiens
YSTDTSGYVV

SEQ ID NO: 580 - DNA, 354 bp, Homo sapiens
cagatcaccttgaaggagtctggtcctacgctggtgaaacccacacagaccctcacggtgacctgcaccttctctgggttctcactcaccactggtggagaggctgtgggctggatccgtcagcccccaggaaaggccctggagtggcttgcaatcatttattgggatgatgataagcgttacagcccatctctgaagagcaggctcaccatcaccaaggacacctccagaaaccaggtggtccttataatgaccaacatggaccctatggacacagccacatattactgtgcacactggggaaaagattcttttgatatctggggccaagggacaatggtcaccgtctcttca

SEQ ID NO: 581 - protein, 118 aa, Homo sapiens
QITLKESGPTLVKPTQTLTVTCTFSGFSLTTGGEAVGWIRQPPGKALEWLAIIYWDDDKRYSPSLKSRLTITKDTSRNQVVLIMTNMDPMDTATYYCAHWGKDSFDIWGQGTMVTVSS

SEQ ID NO: 582 - protein, 10 aa, Homo sapiens
GFSLTTGGEA

SEQ ID NO: 583 - protein, 7 aa, Homo sapiens
IYWDDDK

SEQ ID NO: 584 - protein, 10 aa, Homo sapiens
AHWGKDSFDI

SEQ ID NO: 585 - DNA, 321 bp, Homo sapiens
tcccatgagctgacacagccaccctcggtgtcagtgtccccaggacaaacggccaggatcacctgctctggagatgaattgtcaagaaaatatgcttattggtaccagcagaagtcaggccaggcccctgtgctggtcatctatgaggacaacaaacgaccctccgggatccctgagagattctctggctccagctcagggacaacggccaccttgactgtcagtggggcccaggtggacgatgaagctgactactactgttactcaacagacaccagtggttatgtggtattcggcggagggaccaagttgaccgtccta

SEQ ID NO: 586 - protein, 107 aa, Homo sapiens
SHELTQPPSVSVSPGQTARITCSGDELSRKYAYWYQQKSGQAPVLVIYEDNKRPSGIPERFSGSSSGTTATLTVSGAQVDDEADYYCYSTDTSGYVVFGGGTKLTVL

SEQ ID NO: 587 - protein, 6 aa, Homo sapiens
ELSRKY

SEQ ID NO: 588 - protein, 10 aa, Homo sapiens
YSTDTSGYVV

SEQ ID NO: 589 - DNA, 354 bp, Homo sapiens
cagatcaccttgaaggagtctggtcctacgctggtgaaacccacacagaccctcacgctgacctgcaccttctctgggttctcactcaccactgctggagcggctgtgggctggatccgtcagcccccaggaaaggccctggaatggcttgcaatcatttactgggatgatgataagcgttacagtccatctctgaagaacaggctcaccatcaccaaggacacctccaaaaaccaggttgtccttacaatgaccaacatggaccctgtggacacagccacatattactgtgcacactggggaaaagattcttttgatatctggggccaagggacaatggtcaccgtctcttca

SEQ ID NO: 590 - protein, 118 aa, Homo sapiens
QITLKESGPTLVKPTQTLTLTCTFSGFSLTTAGAAVGWIRQPPGKALEWLAIIYWDDDKRYSPSLKNRLTITKDTSKNQVVLTMTNMDPVDTATYYCAHWGKDSFDIWGQGTMVTVSS

SEQ ID NO: 591 - protein, 10 aa, Homo sapiens
GFSLTTAGAA

SEQ ID NO: 592 - protein, 7 aa, Homo sapiens
IYWDDDK

SEQ ID NO: 593 - protein, 10 aa, Homo sapiens
AHWGKDSFDI

SEQ ID NO: 594 - DNA, 321 bp, Homo sapiens
tcctatgagctgacacagccaccctcggtgtcagtgcccccaggacaaacggccaggatcacctgctctggagatgcattgccaacaaaatatgcttattggtaccagcagaagtcaggccaggcccctgtgctggtcatctatgaggacaacaaacgaccctccgggatccctgagagattctctggctccagctcagggacaacggccaccttgactgtcagtggggcccaggtggaggatgaagctgacttctactgttattcaacagacaccagtggttatgtagtattcggcggagggaccaagttgaccgtccta

SEQ ID NO: 595 - protein, 107 aa, Homo sapiens
SYELTQPPSVSVPPGQTARITCSGDALPTKYAYWYQQKSGQAPVLVIYEDNKRPSGIPERFSGSSSGTTATLTVSGAQVEDEADFYCYSTDTSGYVVFGGGTKLTVL

SEQ ID NO: 596 - protein, 6 aa, Homo sapiens
ALPTKY

SEQ ID NO: 597 - protein, 10 aa, Homo sapiens
YSTDTSGYVV

SEQ ID NO: 598 - DNA, 354 bp, Homo sapiens
cagatcaccttgaaggagtctggtcctacgctggtgaaacccacacagaccctcacggtgacctgcaccttctctgggttctcactcagcactggtggagaggctgtgggctggatccgtcagcccccaggaaaggccctggagtggcttgcaatcatttattgggatgatgataagcgttacagcccatctctgaagagtaggctcaccatcaccaaggacacctccaaaaaccaggtggtccttacaatgaccaacatggaccctatggacacagccacatattactgtgcacactggggaaaagattcttttgatatctggggccaagggacaatggtcaccgtctcttca

SEQ ID NO: 599 - protein, 118 aa, Homo sapiens
QITLKESGPTLVKPTQTLTVTCTFSGFSLSTGGEAVGWIRQPPGKALEWLAIIYWDDDKRYSPSLKSRLTITKDTSKNQVVLTMTNMDPMDTATYYCAHWGKDSFDIWGQGTMVTVSS

SEQ ID NO: 600 - protein, 10 aa, Homo sapiens
GFSLSTGGEA

SEQ ID NO: 601 - protein, 7 aa, Homo sapiens
IYWDDDK

SEQ ID NO: 602 - protein, 10 aa, Homo sapiens
AHWGKDSFDI

SEQ ID NO: 603 - DNA, 321 bp, Homo sapiens; identical to SEQ ID NO: 585

SEQ ID NO: 604 - protein, 107 aa, Homo sapiens; identical to SEQ ID NO: 586

SEQ ID NO: 605 - protein, 6 aa, Homo sapiens
ELSRKY

SEQ ID NO: 606 - protein, 10 aa, Homo sapiens
YSTDTSGYVV

SEQ ID NO: 607 - DNA, 354 bp, Homo sapiens
gaggtgcagctggtggagtctgggggaggcctggtcaagcctggggggtccctgagactctcctgtgcagcctctggattcaccttcagtagctatagcatgaactgggtccgccaggctccagggaaggggctggagtgggtctcatccattagtactggtagtagttacatattctacgcagactcagtgaagggccgattcaccatgtccagagacaacgccaagaactcactgtatctacaaatgaacagcctgagagccgaagacacagctgtgtattactgtgcgaaaactggggatcttcctttctttgactactggggccagggaaccccggtcaccgtctcctca

SEQ ID NO: 608 - protein, 118 aa, Homo sapiens
EVQLVESGGGLVKPGGSLRLSCAASGFTFSSYSMNWVRQAPGKGLEWVSSISTGSSYIFYADSVKGRFTMSRDNAKNSLYLQMNSLRAEDTAVYYCAKTGDLPFFDYWGQGTPVTVSS

SEQ ID NO: 609 - protein, 8 aa, Homo sapiens
GFTFSSYS

SEQ ID NO: 610 - protein, 8 aa, Homo sapiens
ISTGSSYI

SEQ ID NO: 611 - protein, 11 aa, Homo sapiens
AKTGDLPFFDY

SEQ ID NO: 612 - DNA, 330 bp, Homo sapiens
cagtctgccctgactcagcctgcctccgtgtctgggtctcctggacagtcgatcaccatctcctgcactggaaccagcagtgacgttggtcgttataactatgtctcctggtaccaacagcacccaggcaaagcccccaaactcatgatttatgaggtcagtaatcggccctcaggggtttctaatcgcttctctggctccaagtctggcaacacggcctccctgaccatctctgggctccaggctgaggacgaggctgattattactgcagctcatatacaagcagcagcactatggtattcggcggagggaccaagttgactgtctta

SEQ ID NO: 613 - protein, 110 aa, Homo sapiens
QSALTQPASVSGSPGQSITISCTGTSSDVGRYNYVSWYQQHPGKAPKLMIYEVSNRPSGVSNRFSGSKSGNTASLTISGLQAEDEADYYCSSYTSSSTMVFGGGTKLTVL

SEQ ID NO: 614 - protein, 9 aa, Homo sapiens
SSDVGRYNY

SEQ ID NO: 615 - skipped

SEQ ID NO: 616 - protein, 10 aa, Homo sapiens
SSYTSSSTMV

SEQ ID NO: 617 - DNA, 354 bp, Homo sapiens
gaggtgcacctggtggagtctgtgggaggcctggtcaagccgggggggtccctgagactctcctgtgcagcctctggattcaccttcagtagctatagcatgaactgggtccgccaggctccagggaaggggctggagtgggtctcatccattagtactgggagtagttacatattctacgcagactcagtgaagggccgattcaccatctccagagacaacgccaagaactcactgtatctgcaaatgaacagcctgagagccgaggacacagctgtgtattactgtgcgaaaactggggatcttcctttctttgactactggggccagggaaccctggtcaccgtctcctca

SEQ ID NO: 618 - protein, 118 aa, Homo sapiens
EVHLVESVGGLVKPGGSLRLSCAASGFTFSSYSMNWVRQAPGKGLEWVSSISTGSSYIFYADSVKGRFTISRDNAKNSLYLQMNSLRAEDTAVYYCAKTGDLPFFDYWGQGTLVTVSS

SEQ ID NO: 619 - protein, 8 aa, Homo sapiens
GFTFSSYS

SEQ ID NO: 620 - protein, 8 aa, Homo sapiens
ISTGSSYI

SEQ ID NO: 621 - protein, 11 aa, Homo sapiens
AKTGDLPFFDY

SEQ ID NO: 622 - DNA, 330 bp, Homo sapiens
cagtctgccctgactcagcctgcctccgtgtctgggtctcctggacagtcgatcaccatctcctgcactggaaccagcagtgacgttggtcgttataactatgtctcctggtaccaacagcacccaggcaaagcccccaaactcatgatttatgaggtcagtaatcggccctcaggggtttctaatcgcttctctggctccaagtctggcaacacggcctccctgaccatctctgggctccaggctgaggacgaggctgattattactgcagctcatatacaagcagcagcactatggtattcggcggagggaccaagctgaccgtccta

SEQ ID NO: 623 - protein, 110 aa, Homo sapiens; identical to SEQ ID NO: 613

SEQ ID NO: 624 - protein, 9 aa, Homo sapiens
SSDVGRYNY

SEQ ID NO: 625 - protein, 10 aa, Homo sapiens
SSYTSSSTMV

SEQ ID NO: 626 - protein, 354 aa, Homo sapiens
GAGGTACAGCTGGTGGAGTCTGGGGGAGGCCTGGTCAAGCCTGGGGGGTCCCTGAGACTCTCCTGTGAAGCCTCTGGATTCAATTTCAGAAGCTATGCCCTGAACTGGGTCCGCCAGGCTCCAGGGAAGGGGCTGGAGTGGGTCTCATCCATTAGTACTGGTAGTAGTTACATATTCTACGCAGACTCAGTGAAGGGCCGATTCACCATCTCCAGAGACAACGCCAAGAACTCACTGTCTCTGCAAATGAACAGCCTGAGAGCCGAGGACACAGCTGTGTATTACTGTGCGAAAACTGGGGATCTTCCTTTCTTTGACTACTGGGGCCAGGGAACCCTGGTCACCGTCTCCTCA

SEQ ID NO: 627 - protein, 118 aa, Homo sapiens
EVQLVESGGGLVKPGGSLRLSCEASGFNFRSYALNWVRQAPGKGLEWVSSISTGSSYIFYADSVKGRFTISRDNAKNSLSLQMNSLRAEDTAVYYCAKTGDLPFFDYWGQGTLVTVSS

SEQ ID NO: 628 - protein, 8 aa, Homo sapiens
GFNFRSYA

SEQ ID NO: 629 - protein, 8 aa, Homo sapiens
ISTGSSYI

SEQ ID NO: 630 - protein, 11 aa, Homo sapiens
AKTGDLPFFDY

SEQ ID NO: 631 - DNA, 330 bp, Homo sapiens
cagtctgccctgactcagcctgcctccgtgtctgggtctcctggacagtcgatcaccatctcctgcactggaaccagcagtgacgttggtcgttataactatgtctcctggtaccaacagcacccaggcaaagcccccaaactcatgatttatgaggtcagtaatcggccctcaggggtttctaatcgcttctctggctccaagtctggcaacacggcctccctgaccatctctgggctccaggctgaggacgaggctgattattactgcatctcatatacaagcagcagcactatggtattcggcggagggaccaagctgaccgtccta

SEQ ID NO: 632 - protein, 110 aa, Homo sapiens
QSALTQPASVSGSPGQSITISCTGTSSDVGRYNYVSWYQQHPGKAPKLMIYEVSNRPSGVSNRFSGSKSGNTASLTISGLQAEDEADYYCISYTSSSTMVFGGGTKLTVL

SEQ ID NO: 633 - protein, 9 aa, Homo sapiens
SSDVGRYNY

SEQ ID NO: 634 - protein, 10 aa, Homo sapiens
ISYTSSSTMV

SEQ ID NO: 635 - DNA, 354 bp, Homo sapiens
gaggtgcagctggtggagtctgggggaggcctggtcaagcctggggggtccctgagactctcctgtgcagcctctggattcaccttcagtagctatagcgtgaactgggtccgccaggctccagggaaggggctggagtgggtctcatccattagtactggtagtagttacattttctacgcagactcagtgaagggccgattcaccatctccagagacaacgccaagaactcactgtatctgcaaatgaacagcctgagagccgaggacacagctgtgtattactgtgtgaaaactggggatcttcctttctttgactactggggccagggaaccctggtcaccgtctcctca

SEQ ID NO: 636 - protein, 118 aa, Homo sapiens
EVQLVESGGGLVKPGGSLRLSCAASGFTFSSYSVNWVRQAPGKGLEWVSSISTGSSYIFYADSVKGRFTISRDNAKNSLYLQMNSLRAEDTAVYYCVKTGDLPFFDYWGQGTLVTVSS

SEQ ID NO: 637 - protein, 8 aa, Homo sapiens
GFTFSSYS

SEQ ID NO: 638 - protein, 8 aa, Homo sapiens
ISTGSSYI

SEQ ID NO: 639 - protein, 11 aa, Homo sapiens
VKTGDLPFFDY

SEQ ID NO: 640 - DNA, 330 bp, Homo sapiens
cagtctgccctgactcagcctgcctccgtgtctgggtctcctggacagtcgatcaccatctcctgcactggaaccagaagtgacgttggtcgttataactatgtctcctggtaccaacagcacccaggcaaagcccccaaactcatgatttatgaggtcactaatcggccctcaggggtttctaatcgcttctctggctccaagtctggcaacacggcctccctgaccatctctgggctccaggctgaggacgaggctgattattactgcagctcatatacaaacaacagcactatggtattcggcggagggaccaagctgaccgtccta

SEQ ID NO: 641 - protein, 110 aa, Homo sapiens
QSALTQPASVSGSPGQSITISCTGTRSDVGRYNYVSWYQQHPGKAPKLMIYEVTNRPSGVSNRFSGSKSGNTASLTISGLQAEDEADYYCSSYTNNSTMVFGGGTKLTVL

SEQ ID NO: 642 - protein, 9 aa, Homo sapiens
RSDVGRYNY

SEQ ID NO: 643 - skipped

SEQ ID NO: 644 - protein, 10 aa, Homo sapiens
SSYTNNSTMV

SEQ ID NO: 645 - DNA, 354 bp, Homo sapiens
gaggtacagctggtggagtctgggggaggcctggtcaagcctggggggtccctgagactctcctgtgcagcctctggattcaccttcagtagctatgccctgaactgggtccgccaggctccagggaaggggctggagtgggtctcatccattagtactggtagtagttacatattctacgcagactcagtgaagggccgattcaccatctccagagacaacgccaagcactcactgtctctgcaaatgaacagcctgagagccgaggacacagctgtgtattactgtgcgaaaactggggatcttcctttctttgactactggggccagggaaccctggtcaccgtctcctca

SEQ ID NO: 646 - protein, 118 aa, Homo sapiens
EVQLVESGGGLVKPGGSLRLSCAASGFTFSSYALNWVRQAPGKGLEWVSSISTGSSYIFYADSVKGRFTISRDNAKHSLSLQMNSLRAEDTAVYYCAKTGDLPFFDYWGQGTLVTVSS

SEQ ID NO: 647 - protein, 8 aa, Homo sapiens
GFTFSSYA

SEQ ID NO: 648 - protein, 8 aa, Homo sapiens
ISTGSSYI

SEQ ID NO: 649 - protein, 11 aa, Homo sapiens
AKTGDLPFFDY

SEQ ID NO: 650 - DNA, 330 bp, Homo sapiens
cagtctgccctgactcagcctgcctccgtgtctgggtctcctggacagtcgatcaccatctcctgcactggaaccagcagtgacgttggtcgttataactatgtctcctggtaccaacagcacccaggcaaagcccccaaactcatgatttatgaggtcagtaatcggccctcaggggtttctaatcgcttctctggctccaagtctggcaacacggcctccctgaccatctctgggctccaggctgaggacgaggctgattattactgcatctcatatacaagcagcagcactatggtgttcggcggagggaccaagttgaccgtccta

SEQ ID NO: 651 - protein, 110 aa, Homo sapiens; identical to SEQ ID NO: 632

SEQ ID NO: 652 - protein, 9 aa, Homo sapiens
SSDVGRYNY

SEQ ID NO: 653 - protein, 10 aa, Homo sapiens
ISYTSSSTMV

SEQ ID NO: 654 - DNA, 354 bp, Homo sapiens
gaggtgcagctggtggagtctgggggaggcctggtcaagcctggggggtccctgagactctcctgtgcagcctctggattcaccttcagtagctatagcatgaactgggtccgccaggctccagggaaggggctggagtgggtctcatccattagtactggtagtagttacatattctacgcagactcagtgaagggccgattcaccatctccagagacaacgccaagaactcactgtatctgcaaatgaacagcctgagagccgaggacacagctgtgtattactgtgcgaaaactggggatcttcctttctttgactactggggccagggaaccctggtcaccgtctcctca

SEQ ID NO: 655 - protein, 118 aa, Homo sapiens
EVQLVESGGGLVKPGGSLRLSCAASGFTFSSYSMNWVRQAPGKGLEWVSSISTGSSYIFYADSVKGRFTISRDNAKNSLYLQMNSLRAEDTAVYYCAKTGDLPFFDYWGQGTLVTVSS

SEQ ID NO: 656 - protein, 8 aa, Homo sapiens
GFTFSSYS

SEQ ID NO: 657 - protein, 8 aa, Homo sapiens
ISTGSSYI

SEQ ID NO: 658 - protein, 11 aa, Homo sapiens
AKTGDLPFFDY

SEQ ID NO: 659 - DNA, 330 bp, Homo sapiens
cagtctgccctgactcagcctgcctccgtgtctgggtctcctggacagtcgatcaccatctcctgcactggaaccagcagtgacgttggtcgttataactatgtctcctggtaccaacagcacccaggcaaagcccccaaactcatgatttatgaggtcagtaatcggccctcaggggtttctaatcgcttctctggctccaagtctggcaacacggcctccctgaccatctctgggctccaggctgaggacgaggctgattattactgcagctcatatacaagcagtagcacgatggtattcggcggagggaccaagctgaccgtccta

SEQ ID NO: 660 - protein, 110 aa, Homo sapiens; identical to SEQ ID NO: 613

SEQ ID NO: 661 - protein, 9 aa, Homo sapiens
SSDVGRYNY

SEQ ID NO: 662 - protein, 10 aa, Homo sapiens
SSYTSSSTMV

SEQ ID NO: 663 - DNA, 363 bp, Homo sapiens
caggtgcagctgcaggagtcgggcccaggactggtgaagccttcggggaccctgtccctcacctgcgctgtctctggtgactccatcagtaatagtaaatggtggagttgggtccgccagcccccagggaaggggctggagtggattggggaaatctttcatagtgggagcaccaactacaacccgtccctcaagagtcgagtcaccatttcagtagacaagtcccagaaccagttctccctgaagctgaactctgtgaccgccgcggacacggccgtgtattactgtgcgagatcagcatctctttattactactacggtgtggacgtctggggccaagggaccacggtcaccgtctcctca

SEQ ID NO: 664 - protein, 121 aa, Homo sapiens
QVQLQESGPGLVKPSGTLSLTCAVSGDSISNSKWWSWVRQPPGKGLEWIGEIFHSGSTNYNPSLKSRVTISVDKSQNQFSLKLNSVTAADTAVYYCARSASLYYYYGVDVWGQGTTVTVSS

SEQ ID NO: 665 - protein, 9 aa, Homo sapiens
GDSISNSKW

SEQ ID NO: 666 - protein, 7 aa, Homo sapiens
IFHSGST

SEQ ID NO: 667 - protein, 14 aa, Homo sapiens
ARSASLYYYYGVDV

SEQ ID NO: 668 - DNA, 324 bp, Homo sapiens
gaaattgtcttgacgcagtctccaggcaccctgtctttgtctccaggggagagagccaccctctcctgcagggccagtcagagtgttagcaacaactacttagcttggtaccagcagaaacctggccaggctcccaggctcctcatctatggtacatccaggagggacactggcatcccagacaggttcagtggcagtgggtctgggacagacttcactctcaccatcagcagactggagcctgaggattttgcagtgtattactgtgagcagtatggtagtttgcctcggacgttcggccaagggaccaaggtggaaatcaaa

SEQ ID NO: 669 - protein, 108 aa, Homo sapiens
EIVLTQSPGTLSLSPGERATLSCRASQSVSNNYLAWYQQKPGQAPRLLIYGTSRRDTGIPDRFSGSGSGTDFTLTISRLEPEDFAVYYCEQYGSLPRTFGQGTKVEIK

SEQ ID NO: 670 - protein, 7 aa, Homo sapiens
QSVSNNY

SEQ ID NO: 671 - skipped

SEQ ID NO: 672 - protein, 9 aa, Homo sapiens
EQYGSLPRT

SEQ ID NO: 673 - DNA, 369 bp, Homo sapiens
gagatgcagctggtggagtctgggggaggcttggtccagcctggggggtccctgagactctcctgtgcagcctctggattcacctttagtagtttttggatgcgctgggtccgtcaggctccagggaaggggctggagtgggtggccaatataaagcaagatggaactgagaaatactatgtggactctgtgaagggccgattcaccatctccagagacaacgccaagaactcactgtatctgcaaatgaacagtctgagagccgaggacacggctgtatattactgtgtgagagatcgggtcgggggggactattactactacgatatggacgtctggggccaagggaccacggtcaccgtctcctca

SEQ ID NO: 674 - protein, 123 aa, Homo sapiens
EMQLVESGGGLVQPGGSLRLSCAASGFTFSSFWMRWVRQAPGKGLEWVANIKQDGTEKYYVDSVKGRFTISRDNAKNSLYLQMNSLRAEDTAVYYCVRDRVGGDYYYYDMDVWGQGTTVTVSS

SEQ ID NO: 675 - protein, 8 aa, Homo sapiens
GFTFSSFW

SEQ ID NO: 676 - protein, 8 aa, Homo sapiens
IKQDGTEK

SEQ ID NO: 677 - protein, 16 aa, Homo sapiens
VRDRVGGDYYYYDMDV

SEQ ID NO: 678 - DNA, 321 bp, Homo sapiens
gacatccagatgacccagtctccatcctcactgtctgcatctgtaggagacagagtcaccatcacttgtcgggcgagtcaggacattagcaattatttagcctggtttcagcagaaaccagggaaagcccctaagtccctgatctatgctgcatccagtttgcaaagcggggtcccatcaaagttcagcggcagtggatctgggacagatttcactctcaccatcagcggcctgcagcctgaagattctgcaacttattactgtcaacagtataatagttaccctcggacgttcggccaagggaccaaggtggaaatcaaa

SEQ ID NO: 679 - protein, 107 aa, Homo sapiens
DIQMTQSPSSLSASVGDRVTITCRASQDISNYLAWFQQKPGKAPKSLIYAASSLQSGVPSKFSGSGSGTDFTLTISGLQPEDSATYYCQQYNSYPRTFGQGTKVEIK

SEQ ID NO: 680 - protein, 6 aa, Homo sapiens
QDISNY

SEQ ID NO: 681 - protein, 9 aa, Homo sapiens
QQYNSYPRT

SEQ ID NO: 682 - DNA, 369 bp, Homo sapiens
gaagtgcggctggtggagtctgggggagccttggtacagcctggcaggtccctgagactctcctgtgcagcctctggattcatctttgatggttatgccatgcactgggtccggcaagttccagggaagggcctggagtgggtctcaggtattagttggaatagtggtaacataggctatgcggactctgtgaagggccgattcaccatctccagagacaacgccaagaactccctgtatctgcaaatgaacagtctgagagctgaggacacggccttgtattactgtgcaaaagatataaggccttcgggaaagtactattacggtatggacgtctggggccaagggaccacggtcaccgtctcctca

SEQ ID NO: 683 - protein, 123 aa, Homo sapiens
EVRLVESGGALVQPGRSLRLSCAASGFIFDGYAMHWVRQVPGKGLEWVSGISWNSGNIGYADSVKGRFTISRDNAKNSLYLQMNSLRAEDTALYYCAKDIRPSGKYYYGMDVWGQGTTVTVSS

SEQ ID NO: 684 - protein, 8 aa, Homo sapiens
GFIFDGYA

SEQ ID NO: 685 - protein, 8 aa, Homo sapiens
ISWNSGNI

SEQ ID NO: 686 - protein, 16 aa, Homo sapiens
AKDIRPSGKYYYGMDV

SEQ ID NO: 687 - DNA, 321 bp, Homo sapiens
gacatccagatgacccagtctccatcctccctgtctgcatctgtaggagacagagtcaccatcacttgccaggcaagtcaggacattagaaactatttaaattggtatcagcagaaaccagggaaagcccctaagctcctgatctacgatgcatccaatttggaaacaggggtcccatcgaggttcagtggaagtggatctgggacagattttactttcaccatcagcagcctgcagcctgaagatattgcaacatattactgtcaacagtatgataagctccttttcattttcggccctgggaccaaagtggatatcaaa

SEQ ID NO: 688 - protein, 107 aa, Homo sapiens
DIQMTQSPSSLSASVGDRVTITCQASQDIRNYLNWYQQKPGKAPKLLIYDASNLETGVPSRFSGSGSGTDFTFTISSLQPEDIATYYCQQYDKLLFIFGPGTKVDIK

SEQ ID NO: 689 - protein, 6 aa, Homo sapiens
QDIRNY

SEQ ID NO: 690 - protein, 9 aa, Homo sapiens
QQYDKLLFI

SEQ ID NO: 691 - DNA, 360 bp, Homo sapiens
caggtgcagctggtggagtctgggggaggcgtggtccagcctgggaggtccctgagactctcctgtgcagtctctggattcaccttcagtaactatggcatacactgggtccgccaggctccaggcaaggggctggtgtgggtggcagttatatcatatgaaggaagtattaaatattatggagactccgtgaagggccgattcaccatctccagagacaattccaagaacacgctgtatctgcaaatgaacagcctgagagccgaggacacggctgtgtattactgtgcgagaggggcagtggctggcaatgatgcttttgatatctggggccaaggtacaatggtcaccgtctcttca

SEQ ID NO: 692 - protein, 120 aa, Homo sapiens
QVQLVESGGGVVQPGRSLRLSCAVSGFTFSNYGIHWVRQAPGKGLVWVAVISYEGSIKYYGDSVKGRFTISRDNSKNTLYLQMNSLRAEDTAVYYCARGAVAGNDAFDIWGQGTMVTVSS

SEQ ID NO: 693 - protein, 8 aa, Homo sapiens
GFTFSNYG

SEQ ID NO: 694 - protein, 8 aa, Homo sapiens
ISYEGSIK

SEQ ID NO: 695 - protein, 13 aa, Homo sapiens
ARGAVAGNDAFDI

SEQ ID NO: 696 - DNA, 336 bp, Homo sapiens
gatgttgtgatgactcagtctccactctccctgcccgtcacccttggacagccggcctccatctcctgcaggtctagtcaaagcctcgtatacagtgatggaaacacctacttgatttggtttcagcagaggccaggccaatctccaaggcgcctaatttataaggtttctaatcgggactctggggtcccagacagattcagcggcggtgggtcaggcactgatttcacactgaaaatcagcagggtggaggctgaggatgttggggtttattactgcatgcaaggtacacactggcctctcactttcggcggagggaccaaggtggagatcaaa

SEQ ID NO: 697 - protein, 112 aa, Homo sapiens
DVVMTQSPLSLPVTLGQPASISCRSSQSLVYSDGNTYLIWFQQRPGQSPRRLIYKVSNRDSGVPDRFSGGGSGTDFTLKISRVEAEDVGVYYCMQGTHWPLTFGGGTKVEIK

SEQ ID NO: 698 - protein, 11 aa, Homo sapiens
QSLVYSDGNTY

SEQ ID NO: 699 - protein, 9 aa, Homo sapiens
MQGTHWPLT

SEQ ID NO: 700 - DNA, 363 bp, Homo sapiens
caggtgcagctggtgcagtctggggctgaggtgaagaagcctggggcctcagtgaaggtttcctgcaaggcatctggatacaccttcaccagctactgtatacactgggtgcgacaggcccctggacaaggacttgagtggatgggaataatcaaccctagtggtggtggcacaatcttcgcacagaagttccagggcagagtcaccatgaccagggacacgtccacgaccacagtctacatggagttgggcagcctgagatctgacgacacggccctgtattactgtgcgcgagggtggtcttacgatttttggagtggccctgactactggggccagggaaccctggtctccgtctcctct

SEQ ID NO: 701 - protein, 121 aa, Homo sapiens
QVQLVQSGAEVKKPGASVKVSCKASGYTFTSYCIHWVRQAPGQGLEWMGIINPSGGGTIFAQKFQGRVTMTRDTSTTTVYMELGSLRSDDTALYYCARGWSYDFWSGPDYWGQGTLVSVSS

SEQ ID NO: 702 - protein, 8 aa, Homo sapiens
GYTFTSYC

SEQ ID NO: 703 - protein, 8 aa, Homo sapiens
INPSGGGT

SEQ ID NO: 704 - protein, 14 aa, Homo sapiens
ARGWSYDFWSGPDY

SEQ ID NO: 705 - DNA, 336 bp, Homo sapiens
gatattgtgatgacccagactccactctctctgtccgtcacccctggacagccggcctccatctcctgcaagtctagtcagagcctcctgcatagtgatggaaagacctatttgtattggtacctgcagaagccaggccagcctccacagctcctgatctatgaagtttccaaccggttctctggagtgccagataggttcagtggcagcgggtcagggacagatttcacactgaaaatcagccgggtgggggctgaggatgttgggatttattattgcatgcacagtataaagcttcctccgacgttcggccaagggaccaaggtggaaatcaaa

SEQ ID NO: 706 - protein, 112 aa, Homo sapiens
DIVMTQTPLSLSVTPGQPASISCKSSQSLLHSDGKTYLYWYLQKPGQPPQLLIYEVSNRFSGVPDRFSGSGSGTDFTLKISRVGAEDVGIYYCMHSIKLPPTFGQGTKVEIK

SEQ ID NO: 707 - protein, 11 aa, Homo sapiens
QSLLHSDGKTY

SEQ ID NO: 708 - protein, 9 aa, Homo sapiens
MHSIKLPPT

SEQ ID NO: 709 - DNA, 363 bp, Homo sapiens
caggtgcacctggtggagtctgggggaggcatggtccagcctgggaggtccctgagactctcctgtgcagcctctggattcaccttcagtatctatgccatgcactgggtccgccaggctccaggcaaggggctggagtgggtggcagttatatcatatgatggaagtaataaatattatgcagactccgtgaagggccgattcaccatctccagagacaattccaagaacacgctgtatctgcaaatgaacagcctgagagctgaggacacggctgtgtattactgtgcgaaagtctatggtgggagctactgggggggctttgactactggggccagggaaccctggtcaccgtctcctca

SEQ ID NO: 710 - protein, 121 aa, Homo sapiens
QVHLVESGGGMVQPGRSLRLSCAASGFTFSIYAMHWVRQAPGKGLEWVAVISYDGSNKYYADSVKGRFTISRDNSKNTLYLQMNSLRAEDTAVYYCAKVYGGSYWGGFDYWGQGTLVTVSS

SEQ ID NO: 711 - protein, 8 aa, Homo sapiens
GFTFSIYA

SEQ ID NO: 712 - protein, 8 aa, Homo sapiens
ISYDGSNK

SEQ ID NO: 713 - protein, 14 aa, Homo sapiens
AKVYGGSYWGGFDY

SEQ ID NO: 714 - DNA, 336 bp, Homo sapiens
cagtctgtgctgacgcagccgccctcagtgtctggggccccagggcagagggtcaccatctcctgcactgggaccagctccaacatcgggtcaatttatgatgtacactggtaccagcagcttccaggaacagcccccaaactcctcatctatggtaacagcaatcggccctcaggggtccctgaccgattctctggctccaagtctggcacctcggcctccctggccatcactgggctccaggctgaggatgaggctgattattactgccagtcctatgacaccagcctgagtggttcttgggtgttcggcggagggaccaagctgaacgtccta

SEQ ID NO: 715 - protein, 112 aa, Homo sapiens
QSVLTQPPSVSGAPGQRVTISCTGTSSNIGSIYDVHWYQQLPGTAPKLLIYGNSNRPSGVPDRFSGSKSGTSASLAITGLQAEDEADYYCQSYDTSLSGSWVFGGGTKLNVL

SEQ ID NO: 716 - protein, 9 aa, Homo sapiens
SSNIGSIYD

SEQ ID NO: 717 - skipped

SEQ ID NO: 718 - protein, 12 aa, Homo sapiens
QSYDTSLSGSWV

SEQ ID NO: 719 - DNA, 360 bp, Homo sapiens
caggtgcagctggtggagtctgggggaggcgtggtccagcctgggaggtccctgagactctcctgtgcagcgtctggattcaccttcagtagttatggcatgcactgggtccgccaggctccaggcaaggggctggagtgggtgtcagttatatggtatgatggaactaataaatactatgcagactccgtgaagggccgattcaccatctccagagacaattccaagaacacgctgtatctgcaaatgaacagcctgagagccgaggacacggctgtgtattactgtgcgagagagggagtggaattcactgggtactttgactactggggccagggaaccctggtcaccgtctcctca

SEQ ID NO: 720 - protein, 120 aa, Homo sapiens
QVQLVESGGGVVQPGRSLRLSCAASGFTFSSYGMHWVRQAPGKGLEWVSVIWYDGTNKYYADSVKGRFTISRDNSKNTLYLQMNSLRAEDTAVYYCAREGVEFTGYFDYWGQGTLVTVSS

SEQ ID NO: 721 - protein, 8 aa, Homo sapiens
GFTFSSYG

SEQ ID NO: 722 - protein, 8 aa, Homo sapiens
IWYDGTNK

SEQ ID NO: 723 - protein, 13 aa, Homo sapiens
AREGVEFTGYFDY

SEQ ID NO: 724 - DNA, 321 bp, Homo sapiens
tcctatgagctgactcagccaccctcagtgtccgtgtccccaggacagacagccagcatcacctgctctggagataaattgggggataaatatgcttgctggtatcagcagaagccaggccagtcccctgtgctggtcatctatcaagatagcaagcggccctcagggatccctgagcgattctctggctccaactctgggaacacagccactctgaccatcagcgggacccaggctatggatgaggctgactattactgtcaggcgtggaccagcaacactgcagtggtattcggcggagggaccaagctgaccgtccta

SEQ ID NO: 725 - protein, 107 aa, Homo sapiens
SYELTQPPSVSVSPGQTASITCSGDKLGDKYACWYQQKPGQSPVLVIYQDSKRPSGIPERFSGSNSGNTATLTISGTQAMDEADYYCQAWTSNTAVVFGGGTKLTVL

SEQ ID NO: 726 - protein, 6 aa, Homo sapiens
KLGDKY

SEQ ID NO: 727 - skipped

SEQ ID NO: 728 - protein, 10 aa, Homo sapiens
QAWTSNTAVV

SEQ ID NO: 729 - DNA, 369 bp, Homo sapiens
caggtgcagctcgtggagtctgggggaggcgtggtccagcctgggaggtccctgagactctcctgtgcagcgtctggattcaccttcagtagttatggcatgcactgggtccgccaggctccaggcaaggggctggagtgggtggcagttatctggtatgatggaagtaataaattctatgcagactccgtgaagggccgattcaccatctccagagacaattccaagaacacactgtatctgcaaatgaacagcctaaaagccgaagacacggctgtgtattactgtgcgagagatacctggatcggggagtccgatactagctggctcgacccctggggccagggaaccctggtcaccgtctcctca

SEQ ID NO: 730 - protein, 123 aa, Homo sapiens
QVQLVESGGGVVQPGRSLRLSCAASGFTFSSYGMHWVRQAPGKGLEWVAVIWYDGSNKFYADSVKGRFTISRDNSKNTLYLQMNSLKAEDTAVYYCARDTWIGESDTSWLDPWGQGTLVTVSS

SEQ ID NO: 731 - protein, 8 aa, Homo sapiens
GFTFSSYG

SEQ ID NO: 732 - protein, 8 aa, Homo sapiens
IWYDGSNK

SEQ ID NO: 733 - protein, 16 aa, Homo sapiens
ARDTWIGESDTSWLDP

SEQ ID NO: 734 - DNA, 321 bp, Homo sapiens
tcctatgagctgactcagccaccctcagtgtccgtgtccccgggacagacagccagcatcacctgctctggagataaattgggggataaatatgcttgctggtatcaacagaagccaggccagtcccctgtattaatcgtctatcaagatagcaagcggccctcagggatccctgagcgattctctggctccaactctgggaacacagccactctgaccatcagcgggacccaggctatggatgaggctgattattactgtcaggcgtgggacagcttcactgccgtggtattcggcggagggaccaagctgaccgtccta

SEQ ID NO: 735 - protein, 107 aa, Homo sapiens
SYELTQPPSVSVSPGQTASITCSGDKLGDKYACWYQQKPGQSPVLIVYQDSKRPSGIPERFSGSNSGNTATLTISGTQAMDEADYYCQAWDSFTAVVFGGGTKLTVL

SEQ ID NO: 736 - protein, 6 aa, Homo sapiens
KLGDKY

SEQ ID NO: 737 - protein, 10 aa, Homo sapiens
QAWDSFTAVV

SEQ ID NO: 738 - DNA, 366 bp, Homo sapiens
caggtgcagctggtggagtctgggggaggcgcggtccagcctgggaggtccctgagactctcctgtagagcgtctggattcaccttcagtagttttggcatgaattgggtccgccaggttccaggcaaggggctggtatgggtggcaggtatatggtatgatggaaggaataagtactatgcagactccgtgaagggccgattcaccatctccagagagaattccaagaatatgctgtatctgcaaatgaacagtctgagagccgaggacacggctgtgtattactgtgcgagagatcaagatagtggtttcgatggcaactggttcggcccctggggccagggaaccatggtcaccgtctcctca

SEQ ID NO: 739 - protein, 122 aa, Homo sapiens
QVQLVESGGGAVQPGRSLRLSCRASGFTFSSFGMNWVRQVPGKGLVWVAGIWYDGRNKYYADSVKGRFTISRENSKNMLYLQMNSLRAEDTAVYYCARDQDSGFDGNWFGPWGQGTMVTVSS

SEQ ID NO: 740 - protein, 8 aa, Homo sapiens
GFTFSSFG

SEQ ID NO: 741 - protein, 8 aa, Homo sapiens
IWYDGRNK

SEQ ID NO: 742 - protein, 15 aa, Homo sapiens
ARDQDSGFDGNWFGP

SEQ ID NO: 743 - DNA, 318 bp, Homo sapiens
tcctatgaactgactcagccaccctcaatgtccgtgtccccaggacagacagccagcatcacctgctctggagataacttgggggataaatatgtttgctggtatcaacagaggccaggccagtcccctgtgatggtcatctttcaagatagcacgcggccctcagggatccctgagcgattctctggctccaactctggaaacacagccactctgaccatcagcgggacccaggctatggatgaggctgactattactgtcaggcgtgggacagcaacactgcggtattcggcggagggaccaagctgaccgtccta

SEQ ID NO: 744 - protein, 106 aa, Homo sapiens
SYELTQPPSMSVSPGQTASITCSGDNLGDKYVCWYQQRPGQSPVMVIFQDSTRPSGIPERFSGSNSGNTATLTISGTQAMDEADYYCQAWDSNTAVFGGGTKLTVL

SEQ ID NO: 745 - protein, 6 aa, Homo sapiens
NLGDKY

SEQ ID NO: 746 - protein, 9 aa, Homo sapiens
QAWDSNTAV

SEQ ID NO: 747 - DNA, 351 bp, Homo sapiens
caggttcagctggtgcagtctggaactgagatgaaggagcctggggcctcagtgaaggtctcctgcaaggcttctggttacacctttaccaactatggtatcacctgggtgcgacaggcccctggacaagggcttgagtggatgggatggctcaacactaacaatggggacacaaactatgctcagaaactccagggcagagtcaccatgaccacagacacatccacgagcacagcctacatggaactgaggagcctgagatctgacgacacggccgtgtattattgtgcgcgagactcggtgactacgtatgactactggggccagggaaccctggtcaccgtctcctca

SEQ ID NO: 748 - protein, 117 aa, Homo sapiens
QVQLVQSGTEMKEPGASVKVSCKASGYTFTNYGITWVRQAPGQGLEWMGWLNTNNGDTNYAQKLQGRVTMTTDTSTSTAYMELRSLRSDDTAVYYCARDSVTTYDYWGQGTLVTVSS

SEQ ID NO: 749 - protein, 8 aa, Homo sapiens
GYTFTNYG

SEQ ID NO: 750 - protein, 8 aa, Homo sapiens
LNTNNGDT

SEQ ID NO: 751 - protein, 10 aa, Homo sapiens
ARDSVTTYDY

SEQ ID NO: 752 - DNA, 324 bp, Homo sapiens
tcctatgaactgacacagccaccctcggtgtcagtgtccccaggacaaacggccaggatcacctgctctggagatgcattgccaaaaaaatatgcttattggttccagcagaagtcagcccaggcccctgtgctggtcatctatgaggacagcaaacgaccctccgggatccctgagagattctctggctccagctcagggacaatggccaccttgactatcaatggggcccaggtggaggatgaagctgcctactactgttattcattggacagcagtggtaatcattgggtgttcggcggagggaccaagttgaccgtccta

SEQ ID NO: 753 - protein, 108 aa, Homo sapiens
SYELTQPPSVSVSPGQTARITCSGDALPKKYAYWFQQKSAQAPVLVIYEDSKRPSGIPERFSGSSSGTMATLTINGAQVEDEAAYYCYSLDSSGNHWVFGGGTKLTVL

SEQ ID NO: 754 - protein, 6 aa, Homo sapiens
ALPKKY

SEQ ID NO: 755 - skipped

SEQ ID NO: 756 - protein, 11 aa, Homo sapiens
YSLDSSGNHWV

SEQ ID NO: 757 - DNA, 333 bp, Homo sapiens
caggttcaactacagcagtggggcgcaggactggtgaagacttcggagaccctgtccctcacctgcgctgtctatggtgggtctttcaatgatcactattggagctggatccgacagcccccaggaaagggactggagtggattggggaaatcaatcatagtggaagcaccaactacaatccgtccctcaagagtcgagtcaccatgtcactggacacgtccaagaaccagttctccctcaagttgaggtctttgaccgccgcggacacggctatgtattactgtgcgattgagggaatctggggccagggagccatggtcaccgtctcctca

SEQ ID NO: 758 - protein, 111 aa, Homo sapiens
QVQLQQWGAGLVKTSETLSLTCAVYGGSFNDHYWSWIRQPPGKGLEWIGEINHSGSTNYNPSLKSRVTMSLDTSKNQFSLKLRSLTAADTAMYYCAIEGIWGQGAMVTVSS

SEQ ID NO: 759 - protein, 8 aa, Homo sapiens
GGSFNDHY

SEQ ID NO: 760 - protein, 7 aa, Homo sapiens
INHSGST

SEQ ID NO: 761 - protein, 5 aa, Homo sapiens
AIEGI

SEQ ID NO: 762 - DNA, 324 bp, Homo sapiens
tcctatgagctgacacagccaccctcggtgtcagtgtccccaggacaaacggccaggatcacctgctctggagatgcattgccaattaaatatgttcattggtaccagcagaagtcaggccaggcccctgtgctggtcatctatgaggacagcaaacgaccctccgggatccctgagagaatctctggctccagctcagggacaatggccaccttgactatgagtggggcccaggtggaggatgaagctgactactactgttactcaacagacagcagtggtaatcattgggtgttcggcggagggaccaagctgaccgtccta

SEQ ID NO: 763 - protein, 108 aa, Homo sapiens
SYELTQPPSVSVSPGQTARITCSGDALPIKYVHWYQQKSGQAPVLVIYEDSKRPSGIPERISGSSSGTMATLTMSGAQVEDEADYYCYSTDSSGNHWVFGGGTKLTVL

SEQ ID NO: 764 - protein, 6 aa, Homo sapiens
ALPIKY

SEQ ID NO: 765 - protein, 11 aa, Homo sapiens
YSTDSSGNHWV

SEQ ID NO: 766 - DNA, 369 bp, Homo sapiens
caggtgcagctggtggagtctgggggaggcgtggtccagcctgggaagtccctgagactctcctgtgcagcctctggattcgccttcagtagctttggcatgcactgggtccgccaggctccaggcacggggctggagtggttggcaattatatcatttgaaggaactaaaaaatactatgcagactccatgaagggccgaatcaccatctccagagacaattccaagaacacgctgtatctgcaaatgaacagtttgagagctgaggacacggctgtgtattactgtgcggctgactatggtgactacgacgactattactacggtgtgcacgtctggggccaagggaccacggtcaccgtctcctca

SEQ ID NO: 767 - protein, 123 aa, Homo sapiens
QVQLVESGGGVVQPGKSLRLSCAASGFAFSSFGMHWVRQAPGTGLEWLAIISFEGTKKYYADSMKGRITISRDNSKNTLYLQMNSLRAEDTAVYYCAADYGDYDDYYYGVHVWGQGTTVTVSS

SEQ ID NO: 768 - protein, 8 aa, Homo sapiens
GFAFSSFG

SEQ ID NO: 769 - protein, 8 aa, Homo sapiens
ISFEGTKK

SEQ ID NO: 770 - protein, 16 aa, Homo sapiens
AADYGDYDDYYYGVHV

SEQ ID NO: 771 - DNA, 321 bp, Homo sapiens
gacatccaaatgacccagtctccatcctccctgtctgcatctgtaggagacagagtcaccatcacttgccgggcgagtcagggcattgccaattatttagcctggtatcagcagaaaccggggaaagttcctaagctcctgatctatgctacatccactttgcaatcaggggtcccatctcggttcagtggcagtggatctgggacagatttcactctcaccatcagcagcctgcagcctgaagatgttgcaatttattactgtcaaaagtatgacagtgccccattcactttcggccctgggaccaaagtggatttcaaa

SEQ ID NO: 772 - protein, 107 aa, Homo sapiens
DIQMTQSPSSLSASVGDRVTITCRASQGIANYLAWYQQKPGKVPKLLIYATSTLQSGVPSRFSGSGSGTDFTLTISSLQPEDVAIYYCQKYDSAPFTFGPGTKVDFK

SEQ ID NO: 773 - protein, 6 aa, Homo sapiens
QGIANY

SEQ ID NO: 774 - skipped

SEQ ID NO: 775 - protein, 9 aa, Homo sapiens
QKYDSAPFT

SEQ ID NO: 776 - DNA, 357 bp, Homo sapiens
caggtgcacctgcaggagtcgggcccaggactggtgaagccttcggggaccctgtccctcacctgcgctgtctctggtggctccttcagccagattaactggtggagttgggtccgccagtccccaggaaaggggctggagtggattggggaaatctatcatagtgggagtaccaactacaacccgtccctcaagagtcgagtcaccatgtcagtagacaagtccaagaaccagttctccctggcgctgaactctgtgaccgccgcggacacggccgtatattactgtgcgagggggtattatggtgacaactggttcgactcctggggccagggaaccctggtcaccgtctcctca

SEQ ID NO: 777 - protein, 119 aa, Homo sapiens
QVHLQESGPGLVKPSGTLSLTCAVSGGSFSQINWWSWVRQSPGKGLEWIGEIYHSGSTNYNPSLKSRVTMSVDKSKNQFSLALNSVTAADTAVYYCARGYYGDNWFDSWGQGTLVTVSS

SEQ ID NO: 778 - protein, 9 aa, Homo sapiens
GGSFSQINW

SEQ ID NO: 779 - protein, 7 aa, Homo sapiens
IYHSGST

SEQ ID NO: 780 - protein, 12 aa, Homo sapiens
ARGYYGDNWFDS

SEQ ID NO: 781 - DNA, 321 bp, Homo sapiens
gacatccagatgacccagtctccatcctcactgtctgcttctataggcgacagagtcaccatcacttgtcgggcgagtcagggtattagcaactggttagtctggtatcagcagaaaccagagaaagcccctaagtccctgatctatgctgcatccagtttgcaaagtggggtcccatcaaggttcagcggcagtggatctgggacagatttcactctaaccatcagcagcctgcatcctgaagattttgcaacttattactgccaacagtatagtgattaccctctcactttcggcggagggaccaaggtggagatcaaa

SEQ ID NO: 782 - protein, 107 aa, Homo sapiens
DIQMTQSPSSLSASIGDRVTITCRASQGISNWLVWYQQKPEKAPKSLIYAASSLQSGVPSRFSGSGSGTDFTLTISSLHPEDFATYYCQQYSDYPLTFGGGTKVEIK

SEQ ID NO: 783 - protein, 6 aa, Homo sapiens
QGISNW

SEQ ID NO: 784 - protein, 9 aa, Homo sapiens
QQYSDYPLT

SEQ ID NO: 785 - DNA, 357 bp, Homo sapiens
caggtgcacctgcaggagtcgggcccaggactggtgaagccttcggggaccctgtccctcacctgcgctgtctctggtggctccttcagccagattaactggtggagttgggtccgccagtccccaggaaaggggctggagtggattggggaaatctatcatagtgggaacaccaactacaacccgtccctcaagagtcgagtcaccatgtcagtagacaagtccaagaaccagttctccctggcgctgaactctgtgaccgccgcggacacggccgtgtattattgtgcgagggggtattatggtgacaactggttcgactcctggggccagggaaccctggtcaccgtctcctca

SEQ ID NO: 786 - protein, 119 aa, Homo sapiens
QVHLQESGPGLVKPSGTLSLTCAVSGGSFSQINWWSWVRQSPGKGLEWIGEIYHSGNTNYNPSLKSRVTMSVDKSKNQFSLALNSVTAADTAVYYCARGYYGDNWFDSWGQGTLVTVSS

SEQ ID NO: 787 - protein, 9 aa, Homo sapiens
GGSFSQINW

SEQ ID NO: 788 - protein, 7 aa, Homo sapiens
IYHSGNT

SEQ ID NO: 789 - protein, 12 aa, Homo sapiens
ARGYYGDNWFDS

SEQ ID NO: 790 - DNA, 321 bp, Homo sapiens
gacatccagatgacccagtctccatcctcactgtctgcttctataggcgacagagtcaccatcacttgtcgggcgagtcagggtattagcagctggttagtctggtatcagcagaaaccagagaaagcccctaagtccctgatctatgctgcatccagtttgcaaagtggggtcccatcaaggttcagcggcagtggatctgggacagatttcactctcaccatcagcagcctgcatcctgaagattttgcaacttattactgccaacagtatagtgattaccctctcactttcggcggagggaccaaggtggagatcaaa

SEQ ID NO: 791 - protein, 107 aa, Homo sapiens
DIQMTQSPSSLSASIGDRVTITCRASQGISSWLVWYQQKPEKAPKSLIYAASSLQSGVPSRFSGSGSGTDFTLTISSLHPEDFATYYCQQYSDYPLTFGGGTKVEIK

SEQ ID NO: 792 - protein, 6 aa, Homo sapiens
QGISSW

SEQ ID NO: 793 - protein, 9 aa, Homo sapiens
QQYSDYPLT

SEQ ID NO: 794 - DNA, 357 bp, Homo sapiens
caggtgcagctgcaggagtcgggcccaggactggtgaagccttcggggaccctgtccctcacctgcgttgtctctggtggctccttcagcaatactaattggtggagttgggtccgccagcccccagaaaaggggctggagtggattggggaagtctatcatagtgggagcaccaactacaacccgtccctcatgaatcgagtcaccatatcagtagacaagtccaggaaccagttctccctgaacctgagttctgtgaccgccgcggacacggccgtgtatttctgtgcgagggggtattatggtgacaattggttcgactcctggggccagggaaccctggtcaccgtctcctca

SEQ ID NO: 795 - protein, 119 aa, Homo sapiens
QVQLQESGPGLVKPSGTLSLTCVVSGGSFSNTNWWSWVRQPPEKGLEWIGEVYHSGSTNYNPSLMNRVTISVDKSRNQFSLNLSSVTAADTAVYFCARGYYGDNWFDSWGQGTLVTVSS

SEQ ID NO: 796 - protein, 9 aa, Homo sapiens
GGSFSNTNW

SEQ ID NO: 797 - protein, 7 aa, Homo sapiens
VYHSGST

SEQ ID NO: 798 - protein, 12 aa, Homo sapiens
ARGYYGDNWFDS

SEQ ID NO: 799 - DNA, 321 bp, Homo sapiens
gacatccagatgacccagtctccatcctcactgtctgcatctgtaggagacagagtcatcatcacttgtcgggcgagtcagggtattagcagttggttagcctggtatcagcagaaaccagagaaagcccctaagtccctgatctattctgcatccactttgcaaagtggagtcccatcaaggttcagcggcagtggatctgggacagatttcactctcaccatcagcagcctgcagcctgaagattttgcaacttattactgccaacagtctaatagttaccctctcactttcggcggagggaccaaggtcgagatcaaa

SEQ ID NO: 800 - protein, 107 aa, Homo sapiens
DIQMTQSPSSLSASVGDRVIITCRASQGISSWLAWYQQKPEKAPKSLIYSASTLQSGVPSRFSGSGSGTDFTLTISSLQPEDFATYYCQQSNSYPLTFGGGTKVEIK

SEQ ID NO: 801 - protein, 6 aa, Homo sapiens
QGISSW

SEQ ID NO: 802 - protein, 9 aa, Homo sapiens
QQSNSYPLT

SEQ ID NO: 803 - DNA, 357 bp, Homo sapiens
caggtgcagctgcaggagtcgggcccaggactggtgaagccttcggggaccctgtccctcacctgcgttgtctctggtggctccttcaccaatactaattggtggagttgggtccgccagcccccagggaaggggctggagtggattggggaagtctatcatagtgggagcaccaactacaacccgtccctcaagagtcgagtcaccatatcagtagacaagtccaagaaccagttctccctgaacctgacttctgtgaccgccgcggacacggccgtgtattactgtgcgagggggtattatggtgacaattggttcgactcctggggccagggaaccctggtcaccgtctcctca

SEQ ID NO: 804 - protein, 119 aa, Homo sapiens
QVQLQESGPGLVKPSGTLSLTCVVSGGSFTNTNWWSWVRQPPGKGLEWIGEVYHSGSTNYNPSLKSRVTISVDKSKNQFSLNLTSVTAADTAVYYCARGYYGDNWFDSWGQGTLVTVSS

SEQ ID NO: 805 - protein, 9 aa, Homo sapiens
GGSFTNTNW

SEQ ID NO: 806 - protein, 7 aa, Homo sapiens
VYHSGST

SEQ ID NO: 807 - protein, 12 aa, Homo sapiens
ARGYYGDNWFDS

SEQ ID NO: 808 - DNA, 321 bp, Homo sapiens
gacatccagatgacccagtctccatcctcactgtctgcatctgtaggagacagagtcaccatcacttgtcgggcgagtcagggtattagcagctggttagcctggtatcagcagaaaccagagaaagcccctaagtccctgatctattctgcatccactttgcaaagtggagtcccatcaaggttcagcggcagtggatctgggacagatttcactctcaccatcagcagcctgcagcctgaagattttgcaacttattactgccaacagtctaatagttaccctctcactttcggcggagggaccaaggtcgagatcaaa

SEQ ID NO: 809 - protein, 107 aa, Homo sapiens
DIQMTQSPSSLSASVGDRVTITCRASQGISSWLAWYQQKPEKAPKSLIYSASTLQSGVPSRFSGSGSGTDFTLTISSLQPEDFATYYCQQSNSYPLTFGGGTKVEIK

SEQ ID NO: 810 - protein, 6 aa, Homo sapiens
QGISSW

SEQ ID NO: 811 - protein, 9 aa, Homo sapiens
QQSNSYPLT

SEQ ID NO: 812 - DNA, 357 bp, Homo sapiens
caggtgcagctgcaggagtcgggcccaggactggtgaagccttcggggaccctgtccctcacctgcgttgtctctggtggctccttcagcaatactaattggtggagttgggtccgccagcccccagggaaggggctggagtggattggggaagtctttcatagtgggagcaccaactacaacccgtccctcaagagtcgagtcaccatatcagtagacaagtccaagaaccagttctccctgaacctgagttctgtgaccgccgcggacacggccgtgtattactgtgcgagggggtattatggtgacaattggttcgactcctggggccagggaaccctggtcaccgtctcctca

SEQ ID NO: 813 - protein, 119 aa, Homo sapiens
QVQLQESGPGLVKPSGTLSLTCVVSGGSFSNTNWWSWVRQPPGKGLEWIGEVFHSGSTNYNPSLKSRVTISVDKSKNQFSLNLSSVTAADTAVYYCARGYYGDNWFDSWGQGTLVTVSS

SEQ ID NO: 814 - protein, 9 aa, Homo sapiens
GGSFSNTNW

SEQ ID NO: 815 - protein, 7 aa, Homo sapiens
VFHSGST

SEQ ID NO: 816 - protein, 12 aa, Homo sapiens
ARGYYGDNWFDS

SEQ ID NO: 817 - DNA, 321 bp, Homo sapiens
gacatccagatgacccagtctccatcctcactgtctgcatctgtaggagacagagtcaccatcacttgtcgggcgagtcagggtattagcagctggttggcctggtatcagcagaaaccagagaaagcccctaaggccctgatctattctgcatccactttgcaaagtggagtcccatcaaggttcagcggcagtggatctgggacagatttcactctcaccatcagcagcctgcagcctgaagatgttgcgacttattactgccaacagtctagtagttaccctctcactttcggcggagggaccaaggtcgagatcaaa

SEQ ID NO: 818 - protein, 107 aa, Homo sapiens
DIQMTQSPSSLSASVGDRVTITCRASQGISSWLAWYQQKPEKAPKALIYSASTLQSGVPSRFSGSGSGTDFTLTISSLQPEDVATYYCQQSSSYPLTFGGGTKVEIK

SEQ ID NO: 819 - protein, 6 aa, Homo sapiens
QGISSW

SEQ ID NO: 820 - protein, 9 aa, Homo sapiens
QQSSSYPLT

SEQ ID NO: 821 - DNA, 357 bp, Homo sapiens
caggtgcacctgcaggagtcgggcccaggactggtgaagccttcggggaccctgtccctcacctgcgctgtctctggtggctccttcagccagattaactggtggagttgggtccgccagtccccaggaaaggggctggagtggattggagaaatctatcatagtgggagcaccaactacaacccgtccctcaagagtcgagtcaccatgtccgtagacaagtccaagaaccacttctccctggcgttgaattctgtgaccgccgcggacacggccgtgtattattgtgcgcgggggtattatggtgacaactggttcgactcatggggccagggaaccctggtcaccgtctcctca

SEQ ID NO: 822 - protein, 119 aa, Homo sapiens
QVHLQESGPGLVKPSGTLSLTCAVSGGSFSQINWWSWVRQSPGKGLEWIGEIYHSGSTNYNPSLKSRVTMSVDKSKNHFSLALNSVTAADTAVYYCARGYYGDNWFDSWGQGTLVTVSS

SEQ ID NO: 823 - protein, 9 aa, Homo sapiens
GGSFSQINW

SEQ ID NO: 824 - protein, 7 aa, Homo sapiens
IYHSGST

SEQ ID NO: 825 - protein, 12 aa, Homo sapiens
ARGYYGDNWFDS

SEQ ID NO: 826 - DNA, 321 bp, Homo sapiens
gacatccagatgacccagtctccatcctcactgtctgcttctataggcgacagagtcaccatcacttgtcgggcgagtcagggtattagcaactggttagtctggtatcagcagaaaccagagaaagcccctaagtccctgatctatgctgcttccagtttgcaaagtggggtcccatcacggttcagcggcagtggatctgggacagatttcactctcaccatcagcagcctgcatcctgaagattttgcatcttattactgccaacagtatagtgattaccctctcactttcggcggcgggaccagggtggagatcaaa

SEQ ID NO: 827 - protein, 107 aa, Homo sapiens
DIQMTQSPSSLSASIGDRVTITCRASQGISNWLVWYQQKPEKAPKSLIYAASSLQSGVPSRFSGSGSGTDFTLTISSLHPEDFASYYCQQYSDYPLTFGGGTRVEIK

SEQ ID NO: 828 - protein, 6 aa, Homo sapiens
QGISNW

SEQ ID NO: 829 - protein, 9 aa, Homo sapiens
QQYSDYPLT

SEQ ID NO: 830 - DNA, 351 bp, Homo sapiens
gaggtgcagctggtggagtctggaggaggcttgatccagcctggggggtccctgagactctcctgtgcagcctctggggtcaccgtcagtagtaactacatgaactgggtccgccaggctccagggaaggggctggagtgggtctcagttatttatagcggtggtagcacatactacgcagactccgtgaagggccgattcaccatctccagagacaattccaagaacacgctgtatcttcaaatgaacagcctaagagtcgaggacacggccgtatattactgtgcgagagacataggggactacggtatggacgtctggggccaagggaccacggtcaccgtctcctca

SEQ ID NO: 831 - protein, 117 aa, Homo sapiens
EVQLVESGGGLIQPGGSLRLSCAASGVTVSSNYMNWVRQAPGKGLEWVSVIYSGGSTYYADSVKGRFTISRDNSKNTLYLQMNSLRVEDTAVYYCARDIGDYGMDVWGQGTTVTVSS

SEQ ID NO: 832 - protein, 8 aa, Homo sapiens
GVTVSSNY

SEQ ID NO: 833 - protein, 11 aa, Homo sapiens
ARDIGDYGMDV

SEQ ID NO: 834 - DNA, 321 bp, Homo sapiens
gacatccagttgacccaggctccatccttcctgtctgcatctgtaggagacagactcaccatcacttgctgggccagtcagggcattagcagttatttagcctggtatcagcaaaaaccagggaaagcccctaagatcctgatctatgctgcatccactttgcaaagtggggtcccatcaaggttcagcggcagtggatctgggacagaattcactctcacaatcagcagcctgcagcctgaagattttgcaacttattactgtcaacagcttaatagttacccgctcattttcggcggagggaccaaggtggagatcaaa

SEQ ID NO: 835 - protein, 107 aa, Homo sapiens
DIQLTQAPSFLSASVGDRLTITCWASQGISSYLAWYQQKPGKAPKILIYAASTLQSGVPSRFSGSGSGTEFTLTISSLQPEDFATYYCQQLNSYPLIFGGGTKVEIK

SEQ ID NO: 836 - protein, 9 aa, Homo sapiens
QQLNSYPLI

SEQ ID NO: 837 - DNA, 354 bp, Homo sapiens
caggtgcagctggtggagtctgggggaggcgtggtccagcctgggaggtccctgagactctcctgtgcagcgtctggattcaccttcagtaattatggcatgcactgggtccgccaggctccaggcaaggggctggagtgggtggcagttatatggtatgatggaagtaataaatactatgcagactccgtgaagggccgattcaccatctccagagacaattccaagaacacgctgtatctgcaaatgaacagcctgagagccgaggacacggctgtttatttctgtgtgagagaaactgttacggacggtatggacgtctggggccaagggaccacggtcaccgtctcccta

SEQ ID NO: 838 - protein, 118 aa, Homo sapiens
QVQLVESGGGVVQPGRSLRLSCAASGFTFSNYGMHWVRQAPGKGLEWVAVIWYDGSNKYYADSVKGRFTISRDNSKNTLYLQMNSLRAEDTAVYFCVRETVTDGMDVWGQGTTVTVSL

SEQ ID NO: 839 - protein, 8 aa, Homo sapiens
GFTFSNYG

SEQ ID NO: 840 - protein, 8 aa, Homo sapiens
IWYDGSNK

SEQ ID NO: 841 - protein, 11 aa, Homo sapiens
VRETVTDGMDV

SEQ ID NO: 842 - DNA, 321 bp, Homo sapiens
aacatccagatgacccagtctccatctgccatgtctgcatctgtgggagacagagtcaccatcacttgtcgggcgaggcaggacattagcaattatttagcctggtttcagcagaaaccagggaaagtccctaagcacctgatctatgctgcatccagtttgctaagtggggtcccatcaaggttcagcggcagtggatctgggacagaattcactctcacaatcagcagcctgcagcctgaagattttgcaacttattactgtctacaccataatggttacccgtggacgttcggccaagggaccaaggtggaaatcaaa

SEQ ID NO: 843 - protein, 107 aa, Homo sapiens
NIQMTQSPSAMSASVGDRVTITCRARQDISNYLAWFQQKPGKVPKHLIYAASSLLSGVPSRFSGSGSGTEFTLTISSLQPEDFATYYCLHHNGYPWTFGQGTKVEIK

SEQ ID NO: 844 - protein, 6 aa, Homo sapiens
QDISNY

SEQ ID NO: 845 - protein, 9 aa, Homo sapiens
LHHNGYPWT

SEQ ID NO: 846 - DNA, 354 bp, Homo sapiens
gaggtgcagctggtggagtctgggggaggtttggtacagcctggggggtccctgagactctcctgtgcagcctctggattcaccttcagtctctacgacatgcactgggtccgtcaagcaacaggaaaaggtctggagtgggtcgcaggtgttggtattgccggtgacaccatctatccagactccgtgaagggccgattcaccatctccagagagaatgccaagaactccttctttcttcaaatgaacagactgagagccggggacacggctgtgtattactgtgtaagaggaggaactggaacaactttctttgattactggggccagggagtcctggtcaccgtctcctct

SEQ ID NO: 847 - protein, 118 aa, Homo sapiens
EVQLVESGGGLVQPGGSLRLSCAASGFTFSLYDMHWVRQATGKGLEWVAGVGIAGDTIYPDSVKGRFTISRENAKNSFFLQMNRLRAGDTAVYYCVRGGTGTTFFDYWGQGVLVTVSS

SEQ ID NO: 848 - protein, 8 aa, Homo sapiens
GFTFSLYD

SEQ ID NO: 849 - protein, 7 aa, Homo sapiens
VGIAGDT

SEQ ID NO: 850 - protein, 12 aa, Homo sapiens
VRGGTGTTFFDY

SEQ ID NO: 851 - DNA, 321 bp, Homo sapiens
gacatccagatgacccagtctccatcttcactgtctgcatctgtaggagacagagtcaccgtcacttgtcgggcgagtcaggacattaccaattatttagcctggtttcagcagaaaccagggaaagcccctaagtccctgatctatagtgcatccagtttgcaaggtgggaccccctcaaagttcagcggcagtggatctgggacagaattcactctcaccatcagcagcctccagcctgaagattttgcaacttattactgccagcagtataatagtttcccgctcactttcggcggagggaccaaggtggagatcaaa

SEQ ID NO: 852 - protein, 107 aa, Homo sapiens
DIQMTQSPSSLSASVGDRVTVTCRASQDITNYLAWFQQKPGKAPKSLIYSASSLQGGTPSKFSGSGSGTEFTLTISSLQPEDFATYYCQQYNSFPLTFGGGTKVEIK

SEQ ID NO: 853 - protein, 6 aa, Homo sapiens
QDITNY

SEQ ID NO: 854 - protein, 9 aa, Homo sapiens
QQYNSFPLT

SEQ ID NO: 855 - DNA, 372 bp, Homo sapiens
gaggtgaagctggtggagtctgggggaggcttggtacagcggggggggtccctgagactctcctgtgcagcctctggattcaccttcagtagccacgccatgtactgggtccgtcaaattccaggaaaaggtctggagtgggtcgcaggtattggtgttgctggcgacacattttatccagactccgtgaagggccgattcaccatctccagagaaaatgccaacaactccttgtctcttcaaatggacagcctgagaaccggggacacggctatatattactgtgtcagagatggttatagtgggagctacccttaccactactacggtatggacgtctggggccaagggatcacggtcgtcgtctcctca

SEQ ID NO: 856 - protein, 124 aa, Homo sapiens
EVKLVESGGGLVQRGGSLRLSCAASGFTFSSHAMYWVRQIPGKGLEWVAGIGVAGDTFYPDSVKGRFTISRENANNSLSLQMDSLRTGDTAIYYCVRDGYSGSYPYHYYGMDVWGQGITVVVSS

SEQ ID NO: 857 - protein, 8 aa, Homo sapiens
GFTFSSHA

SEQ ID NO: 858 - protein, 7 aa, Homo sapiens
IGVAGDT

SEQ ID NO: 859 - protein, 18 aa, Homo sapiens
VRDGYSGSYPYHYYGMDV

SEQ ID NO: 860 - DNA, 321 bp, Homo sapiens
gacatccagttgacccagtctccatcctcactgtctgcatctgtaggagacagtgtcaccatcacttgtcgggcgagtcagggcattgacacttatttagcctggtttcagcagaaaccagggaaagcccctaagtccctgatctatgttgcatccagtttacagagtggggtcccatcaaaattcagcggcagtggatctgggacagatttcactctcaccatcagcagcctgctgcctgaagattttgcaacttattactgccaacagtataagagttacccgtggacgttcggccaagggaccaaggtggagatcaaa

SEQ ID NO: 861 - protein, 107 aa, Homo sapiens
DIQLTQSPSSLSASVGDSVTITCRASQGIDTYLAWFQQKPGKAPKSLIYVASSLQSGVPSKFSGSGSGTDFTLTISSLLPEDFATYYCQQYKSYPWTFGQGTKVEIK

SEQ ID NO: 862 - protein, 6 aa, Homo sapiens
QGIDTY

SEQ ID NO: 863 - skipped

SEQ ID NO: 864 - protein, 9 aa, Homo sapiens
QQYKSYPWT

SEQ ID NO: 865 - DNA, 345 bp, Homo sapiens
gaggcgcagttggtggagtctggaggaggcttgatccagtctggggggtccctgagactctcctgtatagcctctggattaaccgtcaatagcaactacatgaactgggtccgccaggctccagggaagggactggagtgggtctcagttatttatagcggtggtaccacattctacgcagactccgtgaagggccgattcaccatctccagagacaattccaagaacacgctgtatcttcaaatgactagtctgagagccgaggacacggccgtgtattattgtgcgagagagggatacggtatggacgtctggggccaagggaccacggtcaccgtctcctca

SEQ ID NO: 866 - protein, 115 aa, Homo sapiens
EAQLVESGGGLIQSGGSLRLSCIASGLTVNSNYMNWVRQAPGKGLEWVSVIYSGGTTFYADSVKGRFTISRDNSKNTLYLQMTSLRAEDTAVYYCAREGYGMDVWGQGTTVTVSS

SEQ ID NO: 867 - protein, 8 aa, Homo sapiens
GLTVNSNY

SEQ ID NO: 868 - protein, 7 aa, Homo sapiens
IYSGGTT

SEQ ID NO: 869 - DNA, 324 bp, Homo sapiens
tcctatgtgctgactcagccaccctcagtgtcagtggccccaggaaagacggccaggataaactgtgggggaaataattttggaagtaaaagtgtgcactggtaccagcagaagccaggccaggcccctgtgctggtcatctattatgatagcgaccggccctcagggatccctgagcgattctctggctccaactcagggaacacggccaccctgaccatcagcagggtcgaagccggggatgaggccgactattactgtcaggtgtgggataatagtagtgatcattttgtcttcggagctgggaccaaggtcaccgtccta

SEQ ID NO: 870 - protein, 108 aa, Homo sapiens
SYVLTQPPSVSVAPGKTARINCGGNNFGSKSVHWYQQKPGQAPVLVIYYDSDRPSGIPERFSGSNSGNTATLTISRVEAGDEADYYCQVWDNSSDHFVFGAGTKVTVL

SEQ ID NO: 871 - protein, 6 aa, Homo sapiens
NFGSKS

SEQ ID NO: 872 - protein, 11 aa, Homo sapiens
QVWDNSSDHFV

SEQ ID NO: 873 - DNA, 372 bp, Homo sapiens
gaagtgaagttggtggagtctgggggaggcttggtacagcctggggggtccctgagactctcctgtgcagcctctggattcacattcagtagccacgccatgtactgggtccgtcaaagtccaggaaaaggtctggagtgggtctcaggtattggtgttgctggtgacacattttatgtagactccgtgaagggccgattcaccatctccagagaaaatgccaggaactccttgtctcttcaaatgaacagcctgagagccggggacacggctgtttattactgtgccagagatggttatagtgggacccacccttaccacttctacggtatggacgtctggggccaagggatcacggtcgtcgtctcctca

SEQ ID NO: 874 - protein, 124 aa, Homo sapiens
EVKLVESGGGLVQPGGSLRLSCAASGFTFSSHAMYWVRQSPGKGLEWVSGIGVAGDTFYVDSVKGRFTISRENARNSLSLQMNSLRAGDTAVYYCARDGYSGTHPYHFYGMDVWGQGITVVVSS

SEQ ID NO: 875 - protein, 8 aa, Homo sapiens
GFTFSSHA

SEQ ID NO: 876 - protein, 7 aa, Homo sapiens
IGVAGDT

SEQ ID NO: 877 - protein, 18 aa, Homo sapiens
ARDGYSGTHPYHFYGMDV

SEQ ID NO: 878 - DNA, 321 bp, Homo sapiens
gacatccagatgacccagtctccatcctcactgtctgcatctgtaggagacagtgtcaccatcacttgtcgggcgagtcaggacattaacacttatttagcctggtttcagcagaaaccagggaaagcccctaagtccctgatctatgttgcatccagtttacagagtggggtcccatcaaagttcagcggcagtggatctgggacagatttcactctcaccatcagcagcctgctgcctgaagattttgcaacttattattgccaacagtataaaagttacccgtggacgttcggccaagggaccaaggtggagatcaaa

SEQ ID NO: 879 - protein, 107 aa, Homo sapiens
DIQMTQSPSSLSASVGDSVTITCRASQDINTYLAWFQQKPGKAPKSLIYVASSLQSGVPSKFSGSGSGTDFTLTISSLLPEDFATYYCQQYKSYPWTFGQGTKVEIK

SEQ ID NO: 880 - protein, 6 aa, Homo sapiens
QDINTY

SEQ ID NO: 881 - protein, 9 aa, Homo sapiens
QQYKSYPWT

SEQ ID NO: 882 - DNA, 354 bp, Homo sapiens
gaggtgcaactggtggagtctggaggaggcttgatccagcctggggggtccctgagactctcctgtgcagcctctgggctcaccgtcagtagcaattacatgaactgggtccgccaggctccagggaaggggctggagtgggtctcagttatttatagcggtggtagtacattctacacagattccgtgaagggccgattcaccatctccagagacaactccaagaacacgctgaatcttcaaatgaacagtctgcgagccgaggacacggccgtgtattattgtgcgagagatctggggatacgcgggggtatggacgtctggggccaagggaccacggtcaccgtctcctca

SEQ ID NO: 883 - protein, 118 aa, Homo sapiens
EVQLVESGGGLIQPGGSLRLSCAASGLTVSSNYMNWVRQAPGKGLEWVSVIYSGGSTFYTDSVKGRFTISRDNSKNTLNLQMNSLRAEDTAVYYCARDLGIRGGMDVWGQGTTVTVSS

SEQ ID NO: 884 - protein, 12 aa, Homo sapiens
ARDLGIRGGMDV

SEQ ID NO: 885 - DNA, 318 bp, Homo sapiens
gacatccagttgatccagtctccatccttcctgtctgcatctgtaggagacagagtcaccatcacttgctgggccagtcagggcattagtagttatttagcctggtatcagcaaaaaccagggaaagcccctaacctcctgatctatgctgcatccactttgcaaagtggggtcccatcaaggttcagcggcagtggatctgggacagagttcactctcacaatcagcagcctgcagcctgaggattttgcaacttattactgtcaacagcttgatggttccctcactttcggcggagggaccaaggtggagatcaaa

SEQ ID NO: 886 - protein, 106 aa, Homo sapiens
DIQLIQSPSFLSASVGDRVTITCWASQGISSYLAWYQQKPGKAPNLLIYAASTLQSGVPSRFSGSGSGTEFTLTISSLQPEDFATYYCQQLDGSLTFGGGTKVEIK

SEQ ID NO: 887 - protein, 8 aa, Homo sapiens
QQLDGSLT

SEQ ID NO: 888 - DNA, 354 bp, Homo sapiens
caggtgcaggtagtggagtctgggggaggcgtggtccagcctgggaggtccctgagactctcctgttcagcgtctggattcaccttcagcacctatggcatgcactgggtccgccaggctccaggcaaggggctggagtgggtggcagttatatggtatgatggaagtaataagtactatgcagactccgtgaagggccgattcatcatctccagagacaattccaagaacacgctgtatctgcaaatgagcagtctgagacccgatgacacggctgtgtattattgtgtgagagagggagtggctgacggtatgggcgtctggggccaagggaccacagtcaccgtctcttca

SEQ ID NO: 889 - protein, 118 aa, Homo sapiens
QVQVVESGGGVVQPGRSLRLSCSASGFTFSTYGMHWVRQAPGKGLEWVAVIWYDGSNKYYADSVKGRFIISRDNSKNTLYLQMSSLRPDDTAVYYCVREGVADGMGVWGQGTTVTVSS

SEQ ID NO: 890 - protein, 8 aa, Homo sapiens
GFTFSTYG

SEQ ID NO: 891 - protein, 8 aa, Homo sapiens
IWYDGSNK

SEQ ID NO: 892 - protein, 11 aa, Homo sapiens
VREGVADGMGV

SEQ ID NO: 893 - DNA, 321 bp, Homo sapiens
aacatccagatgacccagtctccatctgccatgtctgcatctgtgggagacagagtcaccatcacttgtcgggcgaggcaggacattagcacttacttagcctggtttcagcagaaaccagggaaagtccctaagcacctgatctatgctgcgtctactttgctaagtggggtcccatcaaggttcggcggcagtggttctgggacagaattcactctcacaatcaccagcctgcagcctgaagattttgcaacttattactgtctacaccataataattatccgtggacgttcggccaagggaccaaggtggaaatcaaa

SEQ ID NO: 894 - protein, 107 aa, Homo sapiens
NIQMTQSPSAMSASVGDRVTITCRARQDISTYLAWFQQKPGKVPKHLIYAASTLLSGVPSRFGGSGSGTEFTLTITSLQPEDFATYYCLHHNNYPWTFGQGTKVEIK

SEQ ID NO: 895 - protein, 6 aa, Homo sapiens
QDISTY

SEQ ID NO: 896 - protein, 9 aa, Homo sapiens
LHHNNYPWT

SEQ ID NO: 897 - DNA, 360 bp, Homo sapiens
caggtgcagctgcaggagtcgggcccaggactggtgaagccttcggggaccctgtccctcacctgcgctgtctctggtggctccattagaagtagtaactggtggatttgggtccgccagtccccagggaaggggctggagtggattggggaaatctatcatggtgggaataccaactataacccgtccctcaagagtcgagtcaccttgtcagtagacaagtccaagaaccagttctccctgaagctgagttctgtgaccgccgcggacacggccgtatattattgtgcgagagctctttacgatatcgggggagtttttgatatttggggccaggggactatggtcaccgtctcttca

SEQ ID NO: 898 - protein, 120 aa, Homo sapiens
QVQLQESGPGLVKPSGTLSLTCAVSGGSIRSSNWWIWVRQSPGKGLEWIGEIYHGGNTNYNPSLKSRVTLSVDKSKNQFSLKLSSVTAADTAVYYCARALYDIGGVFDIWGQGTMVTVSS

SEQ ID NO: 899 - protein, 9 aa, Homo sapiens
GGSIRSSNW

SEQ ID NO: 900 - protein, 7 aa, Homo sapiens
IYHGGNT

SEQ ID NO: 901 - protein, 13 aa, Homo sapiens
ARALYDIGGVFDI

SEQ ID NO: 902 - DNA, 330 bp, Homo sapiens
cagtctgccctgactcagcctgcctccgtgtcggggtctcctggacagtcgatctccatctcctgcactggaaccagcagtgatattggtggttataactatgtctcctggtaccaacagcacccaggcaaagcccccaaactcatgatttatgatgtcagtgagcggccctcaggggtttctaatcgcttctctggctccaagtctggcaacacggcctccctgacaatctctgggctccaggctgaggacgagggtgattattactgctgctcatatgcagctaatagtaatgtggtattcggcggagggaccaaactgtccgtccta

SEQ ID NO: 903 - protein, 110 aa, Homo sapiens
QSALTQPASVSGSPGQSISISCTGTSSDIGGYNYVSWYQQHPGKAPKLMIYDVSERPSGVSNRFSGSKSGNTASLTISGLQAEDEGDYYCCSYAANSNVVFGGGTKLSVL

SEQ ID NO: 904 - protein, 9 aa, Homo sapiens
SSDIGGYNY

SEQ ID NO: 905 - protein, 10 aa, Homo sapiens
CSYAANSNVV

SEQ ID NO: 906 - DNA, 360 bp, Homo sapiens
caggtgcagctgcaggagtcgggcccaggacaggtgaagccttcggggaccctgtccctcacctgcgctgtctctggtggctccatcagaagtagtaactggtggatttgggtccgccagcccccagggaagggtctggagtggattggggaaatctatcatggtggaaacaccaactacagcccgtccctcaagagtcgagtctccatatcagtagacaagtccaagaaccacttctccctgaacctgacctctgtgaccgccgcggacacggccgtatattactgtgcgagagctctttacgatgtcgggggagtttttgatatttggggccaagggactatggtcaccgtctcttca

SEQ ID NO: 907 - protein, 120 aa, Homo sapiens
QVQLQESGPGQVKPSGTLSLTCAVSGGSIRSSNWWIWVRQPPGKGLEWIGEIYHGGNTNYSPSLKSRVSISVDKSKNHFSLNLTSVTAADTAVYYCARALYDVGGVFDIWGQGTMVTVSS

SEQ ID NO: 908 - protein, 9 aa, Homo sapiens
GGSIRSSNW

SEQ ID NO: 909 - protein, 7 aa, Homo sapiens
IYHGGNT

SEQ ID NO: 910 - protein, 13 aa, Homo sapiens
ARALYDVGGVFDI

SEQ ID NO: 911 - DNA, 330 bp, Homo sapiens
cagtctgccctgactcagcctgcctccgtgtcggggtctcctggacagtcgatcaccatctcctgcactggaagcagcagtgatgttggtggttataattatgtctcctggtaccaacagcacccaggcaaagcccccaaactcatgatttatgatgtcagtgagcggccctcaggggtttctaatcgcttctctggctccaagtctggcaacacggcctccctgacaatctctgggctccaggctgaggacgagggtgattattactgctgctcatatgcagctaatagcaatgtggtattcggcggagggaccaaactgtccgtccta

SEQ ID NO: 912 - protein, 110 aa, Homo sapiens
QSALTQPASVSGSPGQSITISCTGSSSDVGGYNYVSWYQQHPGKAPKLMIYDVSERPSGVSNRFSGSKSGNTASLTISGLQAEDEGDYYCCSYAANSNVVFGGGTKLSVL

SEQ ID NO: 913 - protein, 9 aa, Homo sapiens
SSDVGGYNY

SEQ ID NO: 914 - protein, 10 aa, Homo sapiens
CSYAANSNVV

SEQ ID NO: 915 - DNA, 360 bp, Homo sapiens
caggtgcagctgcaggagtcgggcccaggacaggtgaagccttcggggaccctgtccctcacctgcgctgtctctggaggctccatcagaagtagtaactggtggatttgggtccgccagtcccccgggaagggtctggagtggattggggaaatctatcatggtgggaacaccaactacaatccgtccctcaagagtcgactcaccatatcaatagacaagtccaagaaccacttctccatgaagctgcactctgtgaccgccgcggacacggccgtatattactgtgcgagaactctttacgatatcgggggagtttttgatatttggggccaagggactttggtcaccgtctcttca

SEQ ID NO: 916 - protein, 120 aa, Homo sapiens
QVQLQESGPGQVKPSGTLSLTCAVSGGSIRSSNWWIWVRQSPGKGLEWIGEIYHGGNTNYNPSLKSRLTISIDKSKNHFSMKLHSVTAADTAVYYCARTLYDIGGVFDIWGQGTLVTVSS

SEQ ID NO: 917 - protein, 9 aa, Homo sapiens
GGSIRSSNW

SEQ ID NO: 918 - protein, 7 aa, Homo sapiens
IYHGGNT

SEQ ID NO: 919 - protein, 13 aa, Homo sapiens
ARTLYDIGGVFDI

SEQ ID NO: 920 - DNA, 330 bp, Homo sapiens
cagtctgccctgactcagcctgcctccgtgtcggggtctcctggacagtcgatcaccatctcctgcactggaaccagcagtgatgttggtggttataactatgtctcctggtaccaacaccacccaggcaaagcccccaaactcatgatttatgatgttagtgagcggccctcaggggtttctaatcgcttctctggctccaagtctggcaacacggcctccctgacaatctctgggctccaggctgaggacgagggtgattattactgctgctcatatgcagctaatagcaatgtggtattcggcggagggaccaaactgtccgtccta

SEQ ID NO: 921 - protein, 110 aa, Homo sapiens
QSALTQPASVSGSPGQSITISCTGTSSDVGGYNYVSWYQHHPGKAPKLMIYDVSERPSGVSNRFSGSKSGNTASLTISGLQAEDEGDYYCCSYAANSNVVFGGGTKLSVL

SEQ ID NO: 922 - protein, 9 aa, Homo sapiens
SSDVGGYNY

SEQ ID NO: 923 - protein, 10 aa, Homo sapiens
CSYAANSNVV

SEQ ID NO: 924 - DNA, 360 bp, Homo sapiens
caggtgcagctgcaggagtcgggcccaggactggtgaagccttcggggaccctgtccctcacctgcgctgtctctggtggttccattagaagtagtaactggtggatttgggtccgccagtccccagggaaggggctggagtggattggggaaatctatcatggtgggaataccaactataacccgtccctcaagagtcgagtcaccatgtcagtagacaagtccaagaaccagttctccctgaagctgagttctgtgaccgccgcggacacggccgtatattactgtgcgagacctctttacgatatcgggggagtttttgatatttggggccaggggactatggtcaccgtctcttca

SEQ ID NO: 925 - protein, 120 aa, Homo sapiens
QVQLQESGPGLVKPSGTLSLTCAVSGGSIRSSNWWIWVRQSPGKGLEWIGEIYHGGNTNYNPSLKSRVTMSVDKSKNQFSLKLSSVTAADTAVYYCARPLYDIGGVFDIWGQGTMVTVSS

SEQ ID NO: 926 - protein, 9 aa, Homo sapiens
GGSIRSSNW

SEQ ID NO: 927 - protein, 7 aa, Homo sapiens
IYHGGNT

SEQ ID NO: 928 - protein, 13 aa, Homo sapiens
ARPLYDIGGVFDI

SEQ ID NO: 929 - DNA, 330 bp, Homo sapiens
cagtctgccctgactcagcctgcctccgtgtcggggtctcctggacagtcgatctccatctcctgcactggaaccaacagtgatattggtggttataactatgtctcctggtaccaacagcacccaggcaaagcccccaaactcatgatttatgatgtcagtgagcggccctcaggggtttctaatcgcttctctggctccaagtctggcaacacggcctccctgacaatctctgggctccaggctgaggacgagggtgattattactgctgctcatatgcaagtaatagtaatgtggtattcggcggagggaccaaactgtccgtccta

SEQ ID NO: 930 - protein, 110 aa, Homo sapiens
QSALTQPASVSGSPGQSISISCTGTNSDIGGYNYVSWYQQHPGKAPKLMIYDVSERPSGVSNRFSGSKSGNTASLTISGLQAEDEGDYYCCSYASNSNVVFGGGTKLSVL

SEQ ID NO: 931 - protein, 9 aa, Homo sapiens
NSDIGGYNY

SEQ ID NO: 932 - protein, 10 aa, Homo sapiens
CSYASNSNVV

SEQ ID NO: 933 - DNA, 360 bp, Homo sapiens
caggtgcagctgcaggagtcgggcccaggacaggtgaagccttcggggaccctgtccctcacctgcgctgtctctggtggctccatcagaagtagtaactggtggatttgggtccgccagcccccagggaagggtctggagtggattggggaaatctatcatggtgggaataccaactacaagccgtccctcaagagtcgagtcaccatatcagttgacaagtccaagaaccagttctccctccagttgacttctgtgaccgccgcggacacggccgtatactactgtgcgagagctctttatgatatcgggggagtttttgatatttggggccaagggacgatggtcaccgtctcttca

SEQ ID NO: 934 - protein, 120 aa, Homo sapiens
QVQLQESGPGQVKPSGTLSLTCAVSGGSIRSSNWWIWVRQPPGKGLEWIGEIYHGGNTNYKPSLKSRVTISVDKSKNQFSLQLTSVTAADTAVYYCARALYDIGGVFDIWGQGTMVTVSS

SEQ ID NO: 935 - protein, 9 aa, Homo sapiens
GGSIRSSNW

SEQ ID NO: 936 - protein, 7 aa, Homo sapiens
IYHGGNT

SEQ ID NO: 937 - protein, 13 aa, Homo sapiens
ARALYDIGGVFDI

SEQ ID NO: 938 - DNA, 330 bp, Homo sapiens
cagtctgccctgactcagcctgcctccgtgtcggggtctcctggacagtcgatcaccatctcctgcactggaaccagcagtgatgttggtggttataactatgtctcctggtaccaacagtatccaggcaaagcccccaaactcatgatttatgatgtcagtgagcggccctcaggggtttctaatcgcttctctggctccaagtctggcaacacggcctccctgacaatctctgggctccaggctgaggacgagggtgattattactgctgctcatatgcaactaatagcaatgtggtattcggcggagggaccaaactgtccgtccta

SEQ ID NO: 939 - protein, 110 aa, Homo sapiens
QSALTQPASVSGSPGQSITISCTGTSSDVGGYNYVSWYQQYPGKAPKLMIYDVSERPSGVSNRFSGSKSGNTASLTISGLQAEDEGDYYCCSYATNSNVVFGGGTKLSVL

SEQ ID NO: 940 - protein, 9 aa, Homo sapiens
SSDVGGYNY

SEQ ID NO: 941 - protein, 10 aa, Homo sapiens
CSYATNSNVV

SEQ ID NO: 942 - DNA, 360 bp, Homo sapiens
caggtgcagctgcaggagtcgggcccaggactggtgaagccttcggggaccctgtccctcacctgcgctgtctctggtggctccattagaagtagtaactggtggatttgggtccgccagtccccagggaagggactggagtggattggggaaatctatcatggtgggaataccaagtataatccgtccctcaagagtcgagtcaccatgtcagtagacaagtccaagaaccagttctccctgaagctgagttctgtgaccgccgcggacacggccgtatattactgtgcgagagctctttacgatatcgggggagtttttgatatttggggccaggggactatggtcaccgtctcttca

SEQ ID NO: 943 - protein, 120 aa, Homo sapiens
QVQLQESGPGLVKPSGTLSLTCAVSGGSIRSSNWWIWVRQSPGKGLEWIGEIYHGGNTKYNPSLKSRVTMSVDKSKNQFSLKLSSVTAADTAVYYCARALYDIGGVFDIWGQGTMVTVSS

SEQ ID NO: 944 - protein, 9 aa, Homo sapiens
GGSIRSSNW

SEQ ID NO: 945 - protein, 7 aa, Homo sapiens
IYHGGNT

SEQ ID NO: 946 - protein, 13 aa, Homo sapiens
ARALYDIGGVFDI

SEQ ID NO: 947 - DNA, 330 bp, Homo sapiens
cagtctgccctgactcagcctgcctccgtgtcggggtctcctggacagtcgatctccatctcctgcactggaaccagcagtaatattggtggttataactatgtctcctggtaccaacagcacccaggcaaagcccccaaactcatgatttatgatgtcagtgagcggccctcaggggtttctaatcgcttctctggctccaagtctggcaacacggcctccctgacaatctctgggctccaggctgaggacgagggtgattattactgctgctcatatggaagtaatagtaatgtggttttcggcggagggaccaaactgtccgtccta

SEQ ID NO: 948 - protein, 110 aa, Homo sapiens
QSALTQPASVSGSPGQSISISCTGTSSNIGGYNYVSWYQQHPGKAPKLMIYDVSERPSGVSNRFSGSKSGNTASLTISGLQAEDEGDYYCCSYGSNSNVVFGGGTKLSVL

SEQ ID NO: 949 - protein, 9 aa, Homo sapiens
SSNIGGYNY

SEQ ID NO: 950 - protein, 10 aa, Homo sapiens
CSYGSNSNVV

SEQ ID NO: 951 - DNA, 360 bp, Homo sapiens
caggtgcagctgcaggagtcgggcccaggacaggtgaagccttcggggaccctgtccctcacctgcgctgtctctggtggctccatcagaagtagtaactggtggatttgggtccgccagtcccccgggaagggtctggagtggattggggaaatctatcatggtgggaacaccaactacaacccgtccctcaagagtcgactcaccatatcagtagacaagtccaagaaccagttctccatgaagctgagctctgtgaccgccgcggacacggccgtatattactgtgcgagagctctttacgatatcgggggagtttttgatatttggggccaagggactatggtcaccgtctcttca

SEQ ID NO: 952 - protein, 120 aa, Homo sapiens
QVQLQESGPGQVKPSGTLSLTCAVSGGSIRSSNWWIWVRQSPGKGLEWIGEIYHGGNTNYNPSLKSRLTISVDKSKNQFSMKLSSVTAADTAVYYCARALYDIGGVFDIWGQGTMVTVSS

SEQ ID NO: 953 - protein, 9 aa, Homo sapiens
GGSIRSSNW

SEQ ID NO: 954 - protein, 7 aa, Homo sapiens
IYHGGNT

SEQ ID NO: 955 - protein, 13 aa, Homo sapiens
ARALYDIGGVFDI

SEQ ID NO: 956 - DNA, 330 bp, Homo sapiens
cagtctgccctgactcagcctgcctccgtgtcggggtctcctggacagtcgatcaccatctcctgcactggaaccagcagtgatgttggtggttataactatgtctcctggtaccaacagcacacaggcaaagcccccaaattcatgatttatgatgttagtgagcggccctcaggggtttctaatcgcttctctggctccaagtctggcaacacggcctccctgacaatctctgggctccaggctgaggacgagggtgattattactgctgctcatatgcagctgatagcaatgtggttttcggcggagggaccaaactgtccgtccta

SEQ ID NO: 957 - protein, 110 aa, Homo sapiens
QSALTQPASVSGSPGQSITISCTGTSSDVGGYNYVSWYQQHTGKAPKFMIYDVSERPSGVSNRFSGSKSGNTASLTISGLQAEDEGDYYCCSYAADSNVVFGGGTKLSVL

SEQ ID NO: 958 - protein, 9 aa, Homo sapiens
SSDVGGYNY

SEQ ID NO: 959 - protein, 10 aa, Homo sapiens
CSYAADSNVV

SEQ ID NO: 960 - DNA, 360 bp, Homo sapiens
caaatgcagctgcaggagtcgggcccaggactggtgaagccttcggggaccctgtccctcacctgcgctgtctctggtggctccatcagaagtagtaactggtggatttgggtccgccagcccccagggaagggactggagtggattggggaaatctctcacggtgggaacaccaactacaacccgtccctcaaaagtcgagtcaccataactgtagacaagtccaagaaccagttctccctgaaactgccctctatgaccgccgcggacacggccatatattactgtgcgagagctctttacgatatcgggggagtctttgatatttggggcccagggactatggtcaccgtctcttca

SEQ ID NO: 961 - protein, 120 aa, Homo sapiens
QMQLQESGPGLVKPSGTLSLTCAVSGGSIRSSNWWIWVRQPPGKGLEWIGEISHGGNTNYNPSLKSRVTITVDKSKNQFSLKLPSMTAADTAIYYCARALYDIGGVFDIWGPGTMVTVSS

SEQ ID NO: 962 - protein, 9 aa, Homo sapiens
GGSIRSSNW

SEQ ID NO: 963 - protein, 7 aa, Homo sapiens
ISHGGNT

SEQ ID NO: 964 - protein, 13 aa, Homo sapiens
ARALYDIGGVFDI

SEQ ID NO: 965 - DNA, 330 bp, Homo sapiens
cagtctgccctgactcagcctgcctccgtgtcggggtctcctggacagtcgatcaccatgtcctgcactggaaccaacagtgatgttggtggttacaactatgtctcctggtaccaacagcacccaggcaaagcccccaaactcatgatttatgatgtcagtgagcggccctcaggactttctaatcgcttctctggctccaagtctggcaatacggcctccctgacaatctctgggctccaggctgaggacgagggtgattattactgctgctcatttgcagctaatagcaatgtggttttcggcggggggaccaagttgtccgtccta

SEQ ID NO: 966 - protein, 110 aa, Homo sapiens
QSALTQPASVSGSPGQSITMSCTGTNSDVGGYNYVSWYQQHPGKAPKLMIYDVSERPSGLSNRFSGSKSGNTASLTISGLQAEDEGDYYCCSFAANSNVVFGGGTKLSVL

SEQ ID NO: 967 - protein, 9 aa, Homo sapiens
NSDVGGYNY

SEQ ID NO: 968 - protein, 10 aa, Homo sapiens
CSFAANSNVV

SEQ ID NO: 969 - protein, 9 aa, Homo sapiens
GGSIRSSNW

SEQ ID NO: 970 - protein, 7 aa, Homo sapiens
IYHGGNT

SEQ ID NO: 971 - protein, 13 aa, Homo sapiens
ARALYDIGGVFDL

SEQ ID NO: 972 - DNA, 330 bp, Homo sapiens
cagtctgccctgactcagcctgcctccgtgtcggggtctcctggacagtcgatcaccatctcctgcactggaaccagcagtgatgttggtggttataactatgtctcctggtaccaacaacacccaggcaaagcccccaaactcatgatttatgatgtcagtgagcggccctcaggggtttctaatcgcttctctggctccaagtctggcaacacggcctccctgacaatctctgggctccaggctgaggacgagggtgattattactgctgctcatatgcagctaatagcagtgttgtattcggcggagggaccaaactgtccgtccta

SEQ ID NO: 973 - protein, 110 aa, Homo sapiens
QSALTQPASVSGSPGQSITISCTGTSSDVGGYNYVSWYQQHPGKAPKLMIYDVSERPSGVSNRFSGSKSGNTASLTISGLQAEDEGDYYCCSYAANSSVVFGGGTKLSVL

SEQ ID NO: 974 - protein, 9 aa, Homo sapiens
SSDVGGYNY

SEQ ID NO: 975 - protein, 10 aa, Homo sapiens
CSYAANSSVV

SEQ ID NO: 976 - DNA, 360 bp, Homo sapiens
caggtacagctgcaggagtcgggcccaggactggtgaagccttcggggaccctgtccctcacctgtgctgtctctggtggctccatcagaagtagtaactggtggatttgggtccgccagcccccagggaaggggctggagtggattggggaaatctatcatggtgggaacaccaactacaacccgtccctccagagtcgagtcaccatatcagtagacaagtccaagaaccagttctccctgaatctgagttctgtgaccgccgcggacacggccgtatattactgtgcgagagctctttacgatatcgggggagtttttgatatttggggccaagggactttggtcaccgtctcttca

SEQ ID NO: 977 - protein, 120 aa, Homo sapiens
QVQLQESGPGLVKPSGTLSLTCAVSGGSIRSSNWWIWVRQPPGKGLEWIGEIYHGGNTNYNPSLQSRVTISVDKSKNQFSLNLSSVTAADTAVYYCARALYDIGGVFDIWGQGTLVTVSS

SEQ ID NO: 978 - protein, 9 aa, Homo sapiens
GGSIRSSNW

SEQ ID NO: 979 - protein, 7 aa, Homo sapiens
IYHGGNT

SEQ ID NO: 980 - protein, 13 aa, Homo sapiens
ARALYDIGGVFDI

SEQ ID NO: 981 - DNA, 330 bp, Homo sapiens
cagtctgccctgactcagcctgcctccgtgtcggggtctcctggacagtcgaccaccatctcctgcactggaaccagcagtgatgttggtggttataactatgtctcctggtaccaacaacacccaggcaaagcccccaaactcatgatttatgatgtcagtgagcggccctcaggggtttctaatcgcttctctggctccaagtctggcaacacggcctccctgacaatctctgggctccaggctgaggacgagggtgattattactgctgctcatatgcagctaatagcaatgtgctattcggcggagggaccaaactgtccgtccta

SEQ ID NO: 982 - protein, 110 aa, Homo sapiens
QSALTQPASVSGSPGQSTTISCTGTSSDVGGYNYVSWYQQHPGKAPKLMIYDVSERPSGVSNRFSGSKSGNTASLTISGLQAEDEGDYYCCSYAANSNVLFGGGTKLSVL

SEQ ID NO: 983 - protein, 9 aa, Homo sapiens
SSDVGGYNY

SEQ ID NO: 984 - protein, 10 aa, Homo sapiens
CSYAANSNVL

SEQ ID NO: 985 - DNA, 360 bp, Homo sapiens
caggtgcaactgcaggagtcgggcccaggactggtgaagccttcggggaccctgtccctcacctgcgctgtctctggtggctccatcagaagtagtaactggtggatttgggtccgccagtccccagggaaggggctggagtggattggggaaatctatcatggtgggaacaccaactacaacccgtccctcaagagtcgagtcaccacattagtagacaagtccaaaaaccaattctccctgaaattgagttctgtgaccgccgcggacacggccgtatattactgtgcgagagctctttacgatatcgggggagtttttgatatttggagccaagggacgatggtcaccgtctcttca

SEQ ID NO: 986 - protein, 120 aa, Homo sapiens
QVQLQESGPGLVKPSGTLSLTCAVSGGSIRSSNWWIWVRQSPGKGLEWIGEIYHGGNTNYNPSLKSRVTTLVDKSKNQFSLKLSSVTAADTAVYYCARALYDIGGVFDIWSQGTMVTVSS

SEQ ID NO: 987 - protein, 9 aa, Homo sapiens
GGSIRSSNW

SEQ ID NO: 988 - protein, 7 aa, Homo sapiens
IYHGGNT

SEQ ID NO: 989 - protein, 13 aa, Homo sapiens
ARALYDIGGVFDI

SEQ ID NO: 990 - DNA, 330 bp, Homo sapiens
cagtctgccctgactcagcctgcctccgtgtcggggtctcctggacagtcgatcaccatctcctgcactggaaccatcagtgatgttggtggttataactatgtctcttggtaccaacagcacccaggcaaagcccccaaactcatgatttatgatgtcagtgagcggccctcagggatttctaatcgcttctctggctccaagtctggcaacacggcctccctgacaatctctgggctccagactgaggacgagggtgattattactgctgctcatatgcagctaatagcaatgtggtattcggcggagggaccaaactgtccgtccta

SEQ ID NO: 991 - protein, 110 aa, Homo sapiens
QSALTQPASVSGSPGQSITISCTGTISDVGGYNYVSWYQQHPGKAPKLMIYDVSERPSGISNRFSGSKSGNTASLTISGLQTEDEGDYYCCSYAANSNVVFGGGTKLSVL

SEQ ID NO: 992 - protein, 9 aa, Homo sapiens
ISDVGGYNY

SEQ ID NO: 993 - protein, 10 aa, Homo sapiens
CSYAANSNVV

SEQ ID NO: 994 - DNA, 360 bp, Homo sapiens
caggtgcagctgcaggagtcgggcccaggacaggtgaagccttcggggaccctgtccctcacctgcgctgtctctggtggctccatcagaagtagtaactggtggatttgggtccgccagtccccagggaagggtctggagtggattggggaaatctatcatggtggaaacaccaactacaacccgtccctcaagagtcgagtcaccatatcattagacaagtccaagaaccagttctccctgaacctgacctctgtgaccgccgcggacacggccgtatattactgtgcgagagctctttacgatatcgggggagtttttgatatttggggccaagggactatggtcatcgtctcttca

SEQ ID NO: 995 - protein, 120 aa, Homo sapiens
QVQLQESGPGQVKPSGTLSLTCAVSGGSIRSSNWWIWVRQSPGKGLEWIGEIYHGGNTNYNPSLKSRVTISLDKSKNQFSLNLTSVTAADTAVYYCARALYDIGGVFDIWGQGTMVIVSS

SEQ ID NO: 996 - protein, 9 aa, Homo sapiens
GGSIRSSNW

SEQ ID NO: 997 - protein, 7 aa, Homo sapiens
IYHGGNT

SEQ ID NO: 998 - protein, 13 aa, Homo sapiens
ARALYDIGGVFDI

SEQ ID NO: 999 - DNA, 330 bp, Homo sapiens
cagtctgccctgactcagcctgcctccgtgtcggggtctcctggacagtcgatcaccatctcctgcactggaagcagcagtgatgttggtggttataactatgtctcctggtaccaacagcacccaggcaaagcccccaaactcatgatttatgatgtcagtgagcggccctcaggggtttctagtcgattttctggctccaagtctggcagcacggcctccctgacaatctctgggctccaggctgaggacgagggtgattattactgctgctcatatgcaattaatagcgatgtggttttcggcggagggaccaaactgtccgtccta

SEQ ID NO: 1000 - protein, 110 aa, Homo sapiens
QSALTQPASVSGSPGQSITISCTGSSSDVGGYNYVSWYQQHPGKAPKLMIYDVSERPSGVSSRFSGSKSGSTASLTISGLQAEDEGDYYCCSYAINSDVVFGGGTKLSVL

SEQ ID NO: 1001 - protein, 9 aa, Homo sapiens
SSDVGGYNY

SEQ ID NO: 1002 - skipped

SEQ ID NO: 1003 - protein, 10 aa, Homo sapiens
CSYAINSDVV

SEQ ID NO: 1004 - DNA, 360 bp, Homo sapiens
caggtgcagctgcaggagtcgggcccaggacaggtgaagccttcggggaccctgtccctcacctgcgctgtctctggtggctccatcagaagtagtaactggtggatttgggtccgccagtcccccgggaagggtctggagtggattggggaaatctatcatggtgggaagaccaactacaacccgtccctcaagagtcgactcaccatatcagtagacaagtccaagaaccagttctccatgaagctgagctctgtgaccgccgcggacacggccgtatatcactgtgcgagaactctttatgatatcgggggagtttttgatatttggggccaagggactatggtcaccgtctcttca

SEQ ID NO: 1005 - protein, 120 aa, Homo sapiens
QVQLQESGPGQVKPSGTLSLTCAVSGGSIRSSNWWIWVRQSPGKGLEWIGEIYHGGKTNYNPSLKSRLTISVDKSKNQFSMKLSSVTAADTAVYHCARTLYDIGGVFDIWGQGTMVTVSS

SEQ ID NO: 1006 - protein, 9 aa, Homo sapiens
GGSIRSSNW

SEQ ID NO: 1007 - protein, 7 aa, Homo sapiens
IYHGGKT

SEQ ID NO: 1008 - protein, 13 aa, Homo sapiens
ARTLYDIGGVFDI

SEQ ID NO: 1009 - DNA, 330 bp, Homo sapiens
cagtctgccctgactcagcctgcctccgtgtcggggtctcctggacagtcgatcaccatctcctgcactggaaccagcagtgatgttggtggttataactatgtctcctggtaccaacaccacacaggcaaagcccccaaactcatgatttatgatgttagtgagcggccctcaggggtttctaatcgcttctctggctccaagtctggcaacacggcctccctgacaatctctgggctccaggctgaggacgagggtgattattactgctgctcatatgcagctgatagcaatgtggttttcggcggagggaccaaactgtccgtccta

SEQ ID NO: 1010 - protein, 110 aa, Homo sapiens
QSALTQPASVSGSPGQSITISCTGTSSDVGGYNYVSWYQHHTGKAPKLMIYDVSERPSGVSNRFSGSKSGNTASLTISGLQAEDEGDYYCCSYAADSNVVFGGGTKLSVL

SEQ ID NO: 1011 - protein, 9 aa, Homo sapiens
SSDVGGYNY

SEQ ID NO: 1012 - skipped

SEQ ID NO: 1013 - protein, 10 aa, Homo sapiens
CSYAADSNVV

SEQ ID NO: 1014 - DNA, 360 bp, Homo sapiens
caggtgcagctgcaggagtcgggcccaggacaggtgaagccttcggggaccctgtccctcacctgcgctgtctctggtggctccatcagaagtagtaactggtggatttgggtccgccagcccccagggaagggtctggagtggattggggaaatctatcatggtggaaataccaactacaagccgtccctcaagagtcgagtcaccatatcagttgacatgtccaagaaccagttctccctgcagttgacttctgtgaccgccgcggacacggccgtatactactgtgcgagagctctttatgatatcgggggagtctttgatatttggggccaagggacgatggtcaccgtctcttca

SEQ ID NO: 1015 - protein, 120 aa, Homo sapiens
QVQLQESGPGQVKPSGTLSLTCAVSGGSIRSSNWWIWVRQPPGKGLEWIGEIYHGGNTNYKPSLKSRVTISVDMSKNQFSLQLTSVTAADTAVYYCARALYDIGGVFDIWGQGTMVTVSS

SEQ ID NO: 1016 - protein, 9 aa, Homo sapiens
GGSIRSSNW

SEQ ID NO: 1017 - protein, 7 aa, Homo sapiens
IYHGGNT

SEQ ID NO: 1018 - protein, 13 aa, Homo sapiens
ARALYDIGGVFDI

SEQ ID NO: 1019 - DNA, 330 bp, Homo sapiens
cagtctgccctgactcagcctgcctccgtgtcggggtctcctggacagtcgatcaccatctcctgcactggaaccagcagtgatgttggtggttataactatgtctcctggtaccaacagtatccaggcaaagcccccaaactcatgatttatgatgtcagtgagcggccctcaggggtttctaatcgcttctctggctccaagtctggcaacacggcctccctgacaatctctgggctccaggctgaggacgagggtgattattactgctgctcatatgcagctaatagcaatgtggtattcggcggagggaccaaactgtccgtccta

SEQ ID NO: 1020 - protein, 110 aa, Homo sapiens
QSALTQPASVSGSPGQSITISCTGTSSDVGGYNYVSWYQQYPGKAPKLMIYDVSERPSGVSNRFSGSKSGNTASLTISGLQAEDEGDYYCCSYAANSNVVFGGGTKLSVL

SEQ ID NO: 1021 - protein, 9 aa, Homo sapiens
SSDVGGYNY

SEQ ID NO: 1022 - skipped

SEQ ID NO: 1023 - protein, 10 aa, Homo sapiens
CSYAANSNVV

SEQ ID NO: 1024 - DNA, 366 bp, Homo sapiens
caggtccagctggtgcagtctggggctgaggtgaagaagcctgggtcctcggtgaaggtctcctgtaaggcttctggaggcaccttcagcggttatactatcagctggattcgacaggcccctggacagggacttgagtggatgggagggatcatccctagctttggctcattaaactatggacagaagttccaggacagagtctcgattaccacggacgaattaaagagcactgtgtacatggagctgagcagcctgaattctgaggacacggccatatattattgtacgagagaatcaataacttcgggctactattacggtatggccgtctggggccaagggaccacggtcaccgtctcctca

SEQ ID NO: 1025 - protein, 122 aa, Homo sapiens
QVQLVQSGAEVKKPGSSVKVSCKASGGTFSGYTISWIRQAPGQGLEWMGGIIPSFGSLNYGQKFQDRVSITTDELKSTVYMELSSLNSEDTAIYYCTRESITSGYYYGMAVWGQGTTVTVSS

SEQ ID NO: 1026 - protein, 8 aa, Homo sapiens
GGTFSGYT

SEQ ID NO: 1027 - protein, 8 aa, Homo sapiens
IIPSFGSL

SEQ ID NO: 1028 - protein, 15 aa, Homo sapiens
TRESITSGYYYGMAV

SEQ ID NO: 1029 - DNA, 321 bp, Homo sapiens
gacatccagatgacccagtctccatcctccctgtctgcatctgtaggagacagagtcaccatcacttgccgggcaagtcagggcattagagatgatttaggctggtttcagcagaaaccagggaaagcccctaagcgcctgatctctgctgcatccagtttgcaaagtggagtcccatcaaggttcagcggcagtggatctgggacagaattcactctcacaatcagcagcctgcagcctgaagattttgcaacttattactgtctacagcataatagttacccgctcactttcggcggagggaccaaggtggagatcaga

SEQ ID NO: 1030 - protein, 107 aa, Homo sapiens
DIQMTQSPSSLSASVGDRVTITCRASQGIRDDLGWFQQKPGKAPKRLISAASSLQSGVPSRFSGSGSGTEFTLTISSLQPEDFATYYCLQHNSYPLTFGGGTKVEIR

SEQ ID NO: 1031 - protein, 6 aa, Homo sapiens
QGIRDD

SEQ ID NO: 1032 - skipped

SEQ ID NO: 1033 - protein, 9 aa, Homo sapiens
LQHNSYPLT

SEQ ID NO: 1034 - DNA, 357 bp, Homo sapiens
gaggtgcagctggtggagtctggaggaggcttgatccagcctggggggtccctgagactctcctgtgcagcctctgggttcatcgtcagtcgcaattatatgagttgggtccgccaggctccagggaaggggctggactgggtctcagttatttatagcggtggcagcacatactacgcagactccgtgaagggccgatttaccatctccagagacaattccaagaacacgctgtatcttcaaatgaacagcctgagagccgaggacacggccgtctattactgtgcgaggtctatagcagtggctggtgaggggcttgactcctggggccagggaaccctggtcaccgtctcctca

SEQ ID NO: 1035 - protein, 119 aa, Homo sapiens
EVQLVESGGGLIQPGGSLRLSCAASGFIVSRNYMSWVRQAPGKGLDWVSVIYSGGSTYYADSVKGRFTISRDNSKNTLYLQMNSLRAEDTAVYYCARSIAVAGEGLDSWGQGTLVTVSS

SEQ ID NO: 1036 - protein, 8 aa, Homo sapiens
GFIVSRNY

SEQ ID NO: 1037 - protein, 7 aa, Homo sapiens
IYSGGST

SEQ ID NO: 1038 - protein, 13 aa, Homo sapiens
ARSIAVAGEGLDS

SEQ ID NO: 1039 - DNA, 324 bp, Homo sapiens
gaaattgtaatgacacagtctccagccaccctgtctttgtctccaggggacagagccaccctctcctgcagggccagtcagagtgttagcaacatcttcatatcctggtaccagcagaaacctgggcaggctcccaggctcctcatttatggtgcatccatcagggccactgacatcccagccaggttcagtggcagtgggtctgggacagacttcactctcaccatcagcagcctgcagcctgaagattttgcaatttatttctgtcagcaggattataacttaccgctcactttcggcggagggaccaaggtggagatcaaa

SEQ ID NO: 1040 - protein, 108 aa, Homo sapiens
EIVMTQSPATLSLSPGDRATLSCRASQSVSNIFISWYQQKPGQAPRLLIYGASIRATDIPARFSGSGSGTDFTLTISSLQPEDFAIYFCQQDYNLPLTFGGGTKVEIK

SEQ ID NO: 1041 - protein, 7 aa, Homo sapiens
QSVSNIF

SEQ ID NO: 1042 - skipped

SEQ ID NO: 1043 - protein, 9 aa, Homo sapiens
QQDYNLPLT

SEQ ID NO: 1044 - DNA, 378 bp, Homo sapiens
ggagtccaactggtggagtctgggggaggcttggtacagcctggcaggtccctgagactctcctgtgcagcctctggattcacctttgatgattatgccttacactgggtccggcaagttccagggaagggcctggagtgggtctcaagcattagttggaatagtgatgacctaggctatgcggactctgtggagggccgattcaccatctccagagacaacgccaagaactccctgtatctgcaaatgagcagtctgagaactgaggacacggccttgtattactgtgtaaaggatactagggcgcattacgatattttggctggttatagagggcttgactcttggggccagggaaccctggtcaccgtctcttca

SEQ ID NO: 1045 - protein, 126 aa, Homo sapiens
GVQLVESGGGLVQPGRSLRLSCAASGFTFDDYALHWVRQVPGKGLEWVSSISWNSDDLGYADSVEGRFTISRDNAKNSLYLQMSSLRTEDTALYYCVKDTRAHYDILAGYRGLDSWGQGTLVTVSS

SEQ ID NO: 1046 - protein, 8 aa, Homo sapiens
GFTFDDYA

SEQ ID NO: 1047 - protein, 8 aa, Homo sapiens
ISWNSDDL

SEQ ID NO: 1048 - protein, 19 aa, Homo sapiens
VKDTRAHYDILAGYRGLDS

SEQ ID NO: 1049 - DNA, 336 bp, Homo sapiens
gatattgtgatgactcagtctccactctccctgcccgtcacccctggagagccggcctccatctcctgcaggtctactcagagcctcctacatagtaatggatacaactttttggattggtacctgcagaagccagggcagtctccacaactcctgatctatttgggttctaatcgggcctccggggtccctgacaggttcagtggcagtggatcaggcacagatttttcactgaaaatcagcagagtggaggctgaggatattggaatttattactgcatacaaggtctgcaaactcctatcaccttcggccaagggacacgactggagattaaa

SEQ ID NO: 1050 - protein, 112 aa, Homo sapiens
DIVMTQSPLSLPVTPGEPASISCRSTQSLLHSNGYNFLDWYLQKPGQSPQLLIYLGSNRASGVPDRFSGSGSGTDFSLKISRVEAEDIGIYYCIQGLQTPITFGQGTRLEIK

SEQ ID NO: 1051 - protein, 11 aa, Homo sapiens
QSLLHSNGYNF

SEQ ID NO: 1052 - skipped

SEQ ID NO: 1053 - protein, 9 aa, Homo sapiens
IQGLQTPIT

SEQ ID NO: 1054 - DNA, 378 bp, Homo sapiens
gaagtggagctggtggagtctgggggaggcttggtacagcctggcaggtccctgagactctcctgtgctgcctctggcttcatctttgatgattatgccttacactgggtccggcaaattccagggaagggcctggagtgggtctcaagtattagttggaatagtgatgacgtaggctatgcggactctgtggagggccgattcaccatctccagagacaacgccaagaactccctgtatctgcaaatgagcagtctgagagctgaggacacggccttatattactgtgtaaaggatgttagggctcattacgatattttggctgcttatagaggacttgactattggggccagggaaccctggtcaccgtctcctca

SEQ ID NO: 1055 - protein, 126 aa, Homo sapiens
EVELVESGGGLVQPGRSLRLSCAASGFIFDDYALHWVRQIPGKGLEWVSSISWNSDDVGYADSVEGRFTISRDNAKNSLYLQMSSLRAEDTALYYCVKDVRAHYDILAAYRGLDYWGQGTLVTVSS

SEQ ID NO: 1056 - protein, 8 aa, Homo sapiens
GFIFDDYA

SEQ ID NO: 1057 - protein, 8 aa, Homo sapiens
ISWNSDDV

SEQ ID NO: 1058 - protein, 19 aa, Homo sapiens
VKDVRAHYDILAAYRGLDY

SEQ ID NO: 1059 - DNA, 336 bp, Homo sapiens
gatgttgtgatgactcagtctccgctctccctgcccgtcacccctggagagccggcctccatctcctgcaggtctagtcagagcctcctgcatagcaatggatacaactatttggattggtacctgcagaagccagggcagtctccacaactcctgatctatttgggttctaatcgggcctccggggtccctgacaggttcagtggcagtggatcaggcacagattttacactgaagatcagtagaatggaggctgaggatgttggggtttattactgcatgcaaggtctacaaactcctatcaccttcggccaagggacacgactggagattaag

SEQ ID NO: 1060 - protein, 112 aa, Homo sapiens
DVVMTQSPLSLPVTPGEPASISCRSSQSLLHSNGYNYLDWYLQKPGQSPQLLIYLGSNRASGVPDRFSGSGSGTDFTLKISRMEAEDVGVYYCMQGLQTPITFGQGTRLEIK

SEQ ID NO: 1061 - protein, 11 aa, Homo sapiens
QSLLHSNGYNY

SEQ ID NO: 1062 - skipped

SEQ ID NO: 1063 - protein, 9 aa, Homo sapiens
MQGLQTPIT

SEQ ID NO: 1064 - DNA, 378 bp, Homo sapiens
gaagtgcaactggtggagtctgggggaggcttggtacagcctggcaggtccctgagactctcctgtgcagcctctggcttcatctttgatgattatgccttacactgggtccggcaagttccagggaagggcctggagtgggtctcaagtattagttggaatagtgatgacataggctatgcggactctgtggagggccgattcaccatctccagagacaacgccaagaactccctgtatctgcaaatgagtagtctgagagctgaggacacggccttatattactgtgtaaaggatgttagggcgcattacgatattttggctgcttatagaggacttgactattggggccagggaaccctggtcaccgtctcctca

SEQ ID NO: 1065 - protein, 126 aa, Homo sapiens
EVQLVESGGGLVQPGRSLRLSCAASGFIFDDYALHWVRQVPGKGLEWVSSISWNSDDIGYADSVEGRFTISRDNAKNSLYLQMSSLRAEDTALYYCVKDVRAHYDILAAYRGLDYWGQGTLVTVSS

SEQ ID NO: 1066 - protein, 8 aa, Homo sapiens
GFIFDDYA

SEQ ID NO: 1067 - protein, 8 aa, Homo sapiens
ISWNSDDI

SEQ ID NO: 1068 - protein, 19 aa, Homo sapiens
VKDVRAHYDILAAYRGLDY

SEQ ID NO: 1069 - DNA, 336 bp, Homo sapiens
gatattgtgatgactcagtctccactctccctgcccgtcacccctggagagccggcctccatctcctgcaggtctagtcagagcctcctgcatagcaatggatacaactatttggattggtacctgcagaagccagggcagtctccacaactcctgatctatttgggttctaatcgggcctccggggtccctgacaggttcagtgtcagtggatcaggcacagattttacactgaaaatcagcagagtggcggctgaggatgttggggtttattactgcatgcaaggtctacaaactcctatcaccttcggccaagggacacgactggagattaca

SEQ ID NO: 1070 - protein, 112 aa, Homo sapiens
DIVMTQSPLSLPVTPGEPASISCRSSQSLLHSNGYNYLDWYLQKPGQSPQLLIYLGSNRASGVPDRFSVSGSGTDFTLKISRVAAEDVGVYYCMQGLQTPITFGQGTRLEIT

SEQ ID NO: 1071 - protein, 11 aa, Homo sapiens
QSLLHSNGYNY

SEQ ID NO: 1072 - skipped

SEQ ID NO: 1073 - protein, 9 aa, Homo sapiens
MQGLQTPIT

SEQ ID NO: 1074 - DNA, 378 bp, Homo sapiens
caggtccaactggtacagtctggggctgaagtgaagaagcctggggcctcagtgaaggtctcctgcaaggtttccgggttcaccctcactcacttatccattcactgggtgcgacaggctcctggaagaggacttgagtggatgggaggttttgatcctgtggatggtcaaacagtctacgcacagaacttccagggcagagtcaccatgaccgaggacacatctacagacacagccaacatggacctgaacaacctgaaatctgaggacacggccgtttattactgtgcgacgggtgtagtagtaccagctgccccttactactactcctccggaatggacgtctggggccaagggaccacggtcaccgtctcctca

SEQ ID NO: 1075 - protein, 126 aa, Homo sapiens
QVQLVQSGAEVKKPGASVKVSCKVSGFTLTHLSIHWVRQAPGRGLEWMGGFDPVDGQTVYAQNFQGRVTMTEDTSTDTANMDLNNLKSEDTAVYYCATGVVVPAAPYYYSSGMDVWGQGTTVTVSS

SEQ ID NO: 1076 - protein, 8 aa, Homo sapiens
GFTLTHLS

SEQ ID NO: 1077 - protein, 8 aa, Homo sapiens
FDPVDGQT

SEQ ID NO: 1078 - protein, 19 aa, Homo sapiens
ATGVVVPAAPYYYSSGMDV

SEQ ID NO: 1079 - DNA, 327 bp, Homo sapiens
cagtctgtgctgactcagccaccctcaacgtctgggacccccgggcagagggtcaccatctcttgctctggaagcagctccaacatcgcaaaaaattatgtatactggtaccaacaactcccaggaacggcccccaaactcctcatctataggactaatcagcggccctctggggtccctgaccgattctctggctccaggtctggcacctcagcctccctggccatcagtgggctccggtccgaggatgaggctacttattactgtgcaacatgggatgacaccctgagtgtgatattcggcggagggaccaacctgaccgtcctg

SEQ ID NO: 1080 - protein, 109 aa, Homo sapiens
QSVLTQPPSTSGTPGQRVTISCSGSSSNIAKNYVYWYQQLPGTAPKLLIYRTNQRPSGVPDRFSGSRSGTSASLAISGLRSEDEATYYCATWDDTLSVIFGGGTNLTVL

SEQ ID NO: 1081 - protein, 8 aa, Homo sapiens
SSNIAKNY

SEQ ID NO: 1082 - skipped

SEQ ID NO: 1083 - protein, 10 aa, Homo sapiens
ATWDDTLSVI

SEQ ID NO: 1084 - DNA, 360 bp, Homo sapiens
caggagcagctggtggagtctgggggaggcgtggtccagcctgggatgtccctgagactctcctgtgcagcctctggattcaccttcagtaactatggcatgcactgggtccgccagtctcccggcaaggggctggaatgggtgacttttatatcatatgatggaaataatgaatactatgtagactccgtgaagggccgattcaccatctccagagacaattccaagaacacgctgtttctgcaaatgaacagcctgagagctgaggacgcggctgtgtattactgtgcgaaagatcgtgcattgaacctttactactttgattcctggggcccgggaaccctggtcaccgtctcctca

SEQ ID NO: 1085 - protein, 120 aa, Homo sapiens
QEQLVESGGGVVQPGMSLRLSCAASGFTFSNYGMHWVRQSPGKGLEWVTFISYDGNNEYYVDSVKGRFTISRDNSKNTLFLQMNSLRAEDAAVYYCAKDRALNLYYFDSWGPGTLVTVSS

SEQ ID NO: 1086 - protein, 8 aa, Homo sapiens
GFTFSNYG

SEQ ID NO: 1087 - protein, 8 aa, Homo sapiens
ISYDGNNE

SEQ ID NO: 1088 - protein, 13 aa, Homo sapiens
AKDRALNLYYFDS

SEQ ID NO: 1089 - DNA, 336 bp, Homo sapiens
gatattgtgatgactcagcctccactctccctgcccgtcactcctggagagccggcctccatctcctgcaggtctagtcagagcctcctgcataataatgcctacaaccatttgaattggtatctgcagaagccagggcagtctccacagttcctgatctatttgggttctaatcgggcctccggggtccctgacaggttcagtggcagtggatcaggcacagattttacactgaaaatcagcagagtggaggctgaggatgttggggtttattactgcatgcaatctctacaaattccgatcaccttcggccaagggacacgactggaaattaaa

SEQ ID NO: 1090 - protein, 112 aa, Homo sapiens
DIVMTQPPLSLPVTPGEPASISCRSSQSLLHNNAYNHLNWYLQKPGQSPQFLIYLGSNRASGVPDRFSGSGSGTDFTLKISRVEAEDVGVYYCMQSLQIPITFGQGTRLEIK

SEQ ID NO: 1091 - protein, 11 aa, Homo sapiens
QSLLHNNAYNH

SEQ ID NO: 1092 - skipped

SEQ ID NO: 1093 - protein, 9 aa, Homo sapiens
MQSLQIPIT

SEQ ID NO: 1094 - DNA, 357 bp, Homo sapiens
gaggtgcaattggtggagtctgggggaggcttggttcagccgggggggtccctgagactctcctgtgcagcctctggattcacctttagcagttttgccatgagttgggtccgccaggctccagggaagggacttgagtgggtcgcagccttcagtggtcgtggtgcgattacacactacacagactccgtgaagggccggttcaccatctccagagacaattccaagaacacgctgtatctgcaaatgaacagcctgagagccgaggacacggccgtatattactgtgcgacttataattggaacccctactactttgacttctggggccagggaaccctggtcaccgtctcctca

SEQ ID NO: 1095 - protein, 119 aa, Homo sapiens
EVQLVESGGGLVQPGGSLRLSCAASGFTFSSFAMSWVRQAPGKGLEWVAAFSGRGAITHYTDSVKGRFTISRDNSKNTLYLQMNSLRAEDTAVYYCATYNWNPYYFDFWGQGTLVTVSS

SEQ ID NO: 1096 - protein, 8 aa, Homo sapiens
GFTFSSFA

SEQ ID NO: 1097 - protein, 8 aa, Homo sapiens
FSGRGAIT

SEQ ID NO: 1098 - protein, 12 aa, Homo sapiens
ATYNWNPYYFDF

SEQ ID NO: 1099 - DNA, 321 bp, Homo sapiens
gacatccagatgacccagtctccatcttccgtgtctgcatctataggagacagagtcaccatcacctgtcgggcgagtcaggatattaatatctggttggcctggtatcagcagaaaccagggaaagcccctaatctcctgatctttgatacatccaatttacagagtggggtcccatcaaggttcagtggcagtggatctgggtcagatttcactctcaccatcagcagcctgcagcctgaagattttgcaacttactattgtcaacagggtaacagtttccctcggaccttcggccaggggacacgactggaaattaaa

SEQ ID NO: 1100 - protein, 107 aa, Homo sapiens
DIQMTQSPSSVSASIGDRVTITCRASQDINIWLAWYQQKPGKAPNLLIFDTSNLQSGVPSRFSGSGSGSDFTLTISSLQPEDFATYYCQQGNSFPRTFGQGTRLEIK

SEQ ID NO: 1101 - protein, 6 aa, Homo sapiens
QDINIW

SEQ ID NO: 1102 - skipped

SEQ ID NO: 1103 - protein, 9 aa, Homo sapiens
QQGNSFPRT

SEQ ID NO: 1104 - DNA, 354 bp, Homo sapiens
caggtgcaactggtgcagtctggggctgaggtgaagcagcctggggcctcagtgaaggtttcctgcagggcatctggatacgccctcaccagcttctatgttcactgggtgcgacaggcccctggacaagggcttgagtggatgggcataatcaaacccagtggtggtgacacaatctacgctcagaatctccagggcagagtcaccatgaccagggacacgtccacgaacacattctacgtggaactgagcagcctgagatctgaggacacggccctatattactgtgcgatcagtgggaacactagggcttttgaaatctggggccaagggacaatggtcaccgtctcttta

SEQ ID NO: 1105 - protein, 118 aa, Homo sapiens
QVQLVQSGAEVKQPGASVKVSCRASGYALTSFYVHWVRQAPGQGLEWMGIIKPSGGDTIYAQNLQGRVTMTRDTSTNTFYVELSSLRSEDTALYYCAISGNTRAFEIWGQGTMVTVSL

SEQ ID NO: 1106 - protein, 8 aa, Homo sapiens
GYALTSFY

SEQ ID NO: 1107 - protein, 8 aa, Homo sapiens
IKPSGGDT

SEQ ID NO: 1108 - protein, 11 aa, Homo sapiens
AISGNTRAFEI

SEQ ID NO: 1109 - DNA, 330 bp, Homo sapiens
cagtctgtgttgacgcagccgccctcagtgtctgcggccccaggacagaaggtcaccatctcctgctctggaagcagctccaacattgggaataattttgtatcctggtaccagcagctcccaggaatggtccccaaactcctcatttatgccaataataagcgaccctcagggattcctgaccgattctctggctccaggtctggcacgtcagccaccctgggcatcaccggactccagactggggacgaggccgattattactgcggaacttgggatagtagtcggagtgctgtgcttttcggcggagggaccaagatgaccgtccta

SEQ ID NO: 1110 - protein, 110 aa, Homo sapiens
QSVLTQPPSVSAAPGQKVTISCSGSSSNIGNNFVSWYQQLPGMVPKLLIYANNKRPSGIPDRFSGSRSGTSATLGITGLQTGDEADYYCGTWDSSRSAVLFGGGTKMTVL

SEQ ID NO: 1111 - protein, 8 aa, Homo sapiens
SSNIGNNF

SEQ ID NO: 1112 - skipped

SEQ ID NO: 1113 - protein, 11 aa, Homo sapiens
GTWDSSRSAVL

SEQ ID NO: 1114 - DNA, 354 bp, Homo sapiens
caggtgcaactggtgcagtctggggctgaggtgaagcagcctggggcctcagtgaaggtttcctgcagggcatctggatacgccctcaccagcttctatgttcactgggtgcgacaggcccctggacaaggacttgagtggatgggcataatcaaacccagtggtggtgacacaatctacgctcagaatctccagggcagagtcaccatgaccagggacacgtccacgaacacattctacgtggaactgagcagcctgagatctgaggacacggccctatattactgtgcgatcaatggggacactagggcttttgaaatctggggccaagggacaatggtcaccgtctcttta

SEQ ID NO: 1115 - protein, 118 aa, Homo sapiens
QVQLVQSGAEVKQPGASVKVSCRASGYALTSFYVHWVRQAPGQGLEWMGIIKPSGGDTIYAQNLQGRVTMTRDTSTNTFYVELSSLRSEDTALYYCAINGDTRAFEIWGQGTMVTVSL

SEQ ID NO: 1116 - protein, 8 aa, Homo sapiens
GYALTSFY

SEQ ID NO: 1117 - protein, 8 aa, Homo sapiens
IKPSGGDT

SEQ ID NO: 1118 - protein, 11 aa, Homo sapiens
AINGDTRAFEI

SEQ ID NO: 1119 - DNA, 330 bp, Homo sapiens; identical to SEQ ID NO: 1109

SEQ ID NO: 1120 - protein, 110 aa, Homo sapiens; identical to SEQ ID NO: 1110

SEQ ID NO: 1121 - protein, 8 aa, Homo sapiens
SSNIGNNF

SEQ ID NO: 1122 - skipped

SEQ ID NO: 1123 - protein, 11 aa, Homo sapiens
GTWDSSRSAVL

SEQ ID NO: 1124 - DNA, 354 bp, Homo sapiens
caggtgcaactggtgcagtctggggctgaggtgaagcagcctggggcctcagtgaaggtttcctgcagggcatctggatacgccctcaccaacttctatgttcactgggtgcgacaggcccctggacaaaaacttgagtggatgggcataatcaaacccagtggtggtgacacaatctacgctcagaatctccagggcagagtcaccatgaccagggacacgtccacgaatacattctacgtggaactgagcagcctgagatctgaggacacggccctatattactgtgcgatcagtgggaacactagggcttttgaaatctggggccaagggacaatggtcaccgtctcttta

SEQ ID NO: 1125 - protein, 118 aa, Homo sapiens
QVQLVQSGAEVKQPGASVKVSCRASGYALTNFYVHWVRQAPGQKLEWMGIIKPSGGDTIYAQNLQGRVTMTRDTSTNTFYVELSSLRSEDTALYYCAISGNTRAFEIWGQGTMVTVSL

SEQ ID NO: 1126 - protein, 8 aa, Homo sapiens
GYALTNFY

SEQ ID NO: 1127 - protein, 8 aa, Homo sapiens
IKPSGGDT

SEQ ID NO: 1128 - protein, 11 aa, Homo sapiens
AISGNTRAFEI

SEQ ID NO: 1129 - DNA, 330 bp, Homo sapiens
cagtctgtgttgacgcagccgccctcagtgtctgcggccccaggacagaaggtcaccatctcctgctctggaagcagctccaacattgggaataattttatatcctggtaccagcagctcccaggaatggtccccaaactcctcatttatgccaataataagcgaccctcagggattcctgaccgattctctggctccaggtctggcacgtcagccaccctgggcatcaccggactccagactggggacgaggccgattatttctgcggaacttgggatagtagtcggagtgctgtgcttttcggcggagggaccaagatgaccgtccta

SEQ ID NO: 1130 - protein, 110 aa, Homo sapiens
QSVLTQPPSVSAAPGQKVTISCSGSSSNIGNNFISWYQQLPGMVPKLLIYANNKRPSGIPDRFSGSRSGTSATLGITGLQTGDEADYFCGTWDSSRSAVLFGGGTKMTVL

SEQ ID NO: 1131 - protein, 8 aa, Homo sapiens
SSNIGNNF

SEQ ID NO: 1132 - skipped

SEQ ID NO: 1133 - protein, 11 aa, Homo sapiens
GTWDSSRSAVL

SEQ ID NO: 1134 - DNA, 354 bp, Homo sapiens
caggtgcaactggtgcagtctggggctgaggtgaagcagcctgtggcctcagtgaaggtttcctgtcgggcatctggttacgccctcaccagcttctatgttcactgggtgcgacaggcccctggacaagggcttgagtggatgggcataatcaaacccagtggtggtgacacaatctacgctcagaatctccagggcagagtcaccatgaccagggacacgtccacgaacacattctacgtggaactgagcagcctgagatctgaggacacggccctatattactgtgcgatcagtgggaacactagggcttttgaaatctggggccaagggacaatggtcaccgtctcttta

SEQ ID NO: 1135 - protein, 118 aa, Homo sapiens
QVQLVQSGAEVKQPVASVKVSCRASGYALTSFYVHWVRQAPGQGLEWMGIIKPSGGDTIYAQNLQGRVTMTRDTSTNTFYVELSSLRSEDTALYYCAISGNTRAFEIWGQGTMVTVSL

SEQ ID NO: 1136 - protein, 8 aa, Homo sapiens
GYALTSFY

SEQ ID NO: 1137 - protein, 8 aa, Homo sapiens
IKPSGGDT

SEQ ID NO: 1138 - protein, 11 aa, Homo sapiens
AISGNTRAFEI

SEQ ID NO: 1139 - DNA, 330 bp, Homo sapiens; identical to SEQ ID NO: 1109

SEQ ID NO: 1140 - protein, 110 aa, Homo sapiens; identical to SEQ ID NO: 1110

SEQ ID NO: 1141 - protein, 8 aa, Homo sapiens
SSNIGNNF

SEQ ID NO: 1142 - skipped

SEQ ID NO: 1143 - protein, 11 aa, Homo sapiens
GTWDSSRSAVL

SEQ ID NO: 1144 - DNA, 354 bp, Homo sapiens
caggtgcaactggtgcagtctggggctgaggtgaagcagcctggggcctcagtgaaggtttcctgtagggcatctggatacgccctcaccagcttctatgttcactgggtgcgacaggcccctggacaagggcttgagtggatgggcataatcaaacccagtggtggtgacacaatctacgctcagaatctccagggcagagtcaccatgaccagggacacgtccacgaacacattctacgtggaactgagcagcctgagatctgaggacacggccctatattactgtgcgatcagtgggaacactagggcttttgaaatctggggccaagggacaatggtcaccgtctcttta

SEQ ID NO: 1145 - protein, 118 aa, Homo sapiens; identical to SEQ ID NO: 1105

SEQ ID NO: 1146 - protein, 8 aa, Homo sapiens
GYALTSFY

SEQ ID NO: 1147 - protein, 8 aa, Homo sapiens
IKPSGGDT

SEQ ID NO: 1148 - protein, 11 aa, Homo sapiens
AISGNTRAFEI

SEQ ID NO: 1149 - DNA, 330 bp, Homo sapiens
cagtctgtgttgacgcagccgccctcagtgtctgcggccccaggacagaaggtcaccatctcctgttctggaagcagctccaacattgggaataattttgtctcctggtaccagcagctcccaggaatggtccccaaactcctcatttatgccaataataagcgaccctcagggattcctgaccgattctctggctccaggtctggcacgtcagccaccctgggcatcaccggactccagactggggacgaggccgattattactgcggaacttgggatagtagtcggagtgttgtgcttttcggcggagggaccaagatgaccgtccta

SEQ ID NO: 1150 - protein, 110 aa, Homo sapiens
QSVLTQPPSVSAAPGQKVTISCSGSSSNIGNNFVSWYQQLPGMVPKLLIYANNKRPSGIPDRFSGSRSGTSATLGITGLQTGDEADYYCGTWDSSRSVVLFGGGTKMTVL

SEQ ID NO: 1151 - protein, 8 aa, Homo sapiens
SSNIGNNF

SEQ ID NO: 1152 - skipped

SEQ ID NO: 1153 - protein, 11 aa, Homo sapiens
GTWDSSRSVVL

SEQ ID NO: 1154 - DNA, 354 bp, Homo sapiens
caggtgcaactggtgcagtctggggctgaggtgaagcagcctggggcctcagtgaaggtttcctgcaaggcatctggatacgccctcaccagcttctatgttcactgggtgcgacaggcccctggacaagggcttgagtggatgggcataatcaaacctagtggtggtaacacaatctacgctcagaatttccagggcagagtcaccatgaccagggacacgtccacgaacacattctacgtggaactgaacagcctgagatctgaggacacggccctatattactgtgcgatcagtgggaacactagggcttttgaaatctggggccaggggacaatggtcaccgtctcttca

SEQ ID NO: 1155 - protein, 118 aa, Homo sapiens
QVQLVQSGAEVKQPGASVKVSCKASGYALTSFYVHWVRQAPGQGLEWMGIIKPSGGNTIYAQNFQGRVTMTRDTSTNTFYVELNSLRSEDTALYYCAISGNTRAFEIWGQGTMVTVSS

SEQ ID NO: 1156 - protein, 8 aa, Homo sapiens
GYALTSFY

SEQ ID NO: 1157 - protein, 8 aa, Homo sapiens
IKPSGGNT

SEQ ID NO: 1158 - protein, 11 aa, Homo sapiens
AISGNTRAFEI

SEQ ID NO: 1159 - DNA, 330 bp, Homo sapiens
cagtctgtgttgacgcagccgccctcagtgtctgcggccccaggacagaaggtcaccatctcctgctctggaagcagctccaacattgggaataattatgtatcctggtaccagcagttcccaggaatagtccccaaactcctcatttatgccaataataagcgaccctcagggattcctgaccgattctctggctccaggtctggcacgtcagccaccctggacatcaccggactccagactggggacgaggccgattattactgcggaacttgggatagcagccggagtgctgtgcttttcggcggagggaccaagatgaccgtccta

SEQ ID NO: 1160 - protein, 110 aa, Homo sapiens
QSVLTQPPSVSAAPGQKVTISCSGSSSNIGNNYVSWYQQFPGIVPKLLIYANNKRPSGIPDRFSGSRSGTSATLDITGLQTGDEADYYCGTWDSSRSAVLFGGGTKMTVL

SEQ ID NO: 1161 - protein, 8 aa, Homo sapiens
SSNIGNNY

SEQ ID NO: 1162 - skipped

SEQ ID NO: 1163 - protein, 11 aa, Homo sapiens
GTWDSSRSAVL

SEQ ID NO: 1164 - DNA, 354 bp, Homo sapiens
caggtgcaactggtgcagtctggggctgaggtgaagcagccgggggcctcagtgaaggtctcctgcaaggcatctggatacgccctcaccagcttctatgttcactgggtgcgacaggcccctggacaagggcttgagtggatgggcataatcaaacctagtggtggtaacacaatctacgctcagaatttccagggcagagtcaccatgaccagggacacgtccacgaacacattctacgtggaactaaacagcctgagatctgaggacacggccctatattactgtgcgatcagtgggaacactagggcttttgaaatctggggccaagggacaatggtcaccgtctcttta

SEQ ID NO: 1165 - protein, 118 aa, Homo sapiens
QVQLVQSGAEVKQPGASVKVSCKASGYALTSFYVHWVRQAPGQGLEWMGIIKPSGGNTIYAQNFQGRVTMTRDTSTNTFYVELNSLRSEDTALYYCAISGNTRAFEIWGQGTMVTVSL

SEQ ID NO: 1166 - protein, 8 aa, Homo sapiens
GYALTSFY

SEQ ID NO: 1167 - protein, 8 aa, Homo sapiens
IKPSGGNT

SEQ ID NO: 1168 - protein, 11 aa, Homo sapiens
AISGNTRAFEI

SEQ ID NO: 1169 - DNA, 330 bp, Homo sapiens
cagtctgtgttgacgcagccgccctcagtgtctgcggccccaggacagaaggtcaccatctcctgctctggaagcagctccaacattgggaataattatgtatcctggtaccagcagctcccaggaatagtccccaagctcctcatttatgccaataataagcgaccctcagggattcctgaccgattctctggctccaggtctggcacgtcagccaccctgggcatcaccggactccagactggggacgaggccgattattactgcggaacttgggatagcagccggagtgctgtacttttcggcggagggaccaagatgaccgtccta

SEQ ID NO: 1170 - protein, 110 aa, Homo sapiens
QSVLTQPPSVSAAPGQKVTISCSGSSSNIGNNYVSWYQQLPGIVPKLLIYANNKRPSGIPDRFSGSRSGTSATLGITGLQTGDEADYYCGTWDSSRSAVLFGGGTKMTVL

SEQ ID NO: 1171 - protein, 8 aa, Homo sapiens
SSNIGNNY

SEQ ID NO: 1172 - skipped

SEQ ID NO: 1173 - protein, 11 aa, Homo sapiens
GTWDSSRSAVL

SEQ ID NO: 1174 - DNA, 354 bp, Homo sapiens
caggtgcaactggtgcagtctggggctgaggtgaagcagcctggggcctcagtgaaggtttcctgcagggcatctggatacgccctcaccagcttctatgttcactgggtgcgacaggcccctggacaagggcttgagtggatgggcataatcaaacccagtggtggtgacacaatctacgctcagaatctccagggcagagtcaccatgaccagggacacgtccacgaacacattctacgtggaactgagcagcctgagatctgaggacacggccctttattactgtgcgatcagtgggaacactagggcttttgaaatctggggccaagggacaatggtcaccgtctcttta

SEQ ID NO: 1175 - protein, 118 aa, Homo sapiens; identical to SEQ ID NO: 1105

SEQ ID NO: 1176 - protein, 8 aa, Homo sapiens
GYALTSFY

SEQ ID NO: 1177 - protein, 8 aa, Homo sapiens
IKPSGGDT

SEQ ID NO: 1178 - protein, 11 aa, Homo sapiens
AISGNTRAFEI

SEQ ID NO: 1179 - DNA, 330 bp, Homo sapiens; identical to SEQ ID NO: 1109

SEQ ID NO: 1180 - protein, 110 aa, Homo sapiens; identical to SEQ ID NO: 1110

SEQ ID NO: 1181 - protein, 8 aa, Homo sapiens
SSNIGNNF

SEQ ID NO: 1182 - skipped

SEQ ID NO: 1183 - protein, 11 aa, Homo sapiens
GTWDSSRSAVL

SEQ ID NO: 1184 - DNA, 354 bp, Homo sapiens
caggtgcaactggtgcagtctggggctgaggtgaagcagcctggggcctcagtgaaggtttcctgcagggcatctggatacgccctcaccagcttctatgttcactgggtgcgacaggcccctggacaaggacttgactggatgggcataatcaaacccagtggtggttatacaatttacgctcagaatctccagggcagagtcaccatgaccagggacacgtccacgaacacattctacgtggaactgagcagcctgagatctgaggacacggccctatattactgtgcgatcagtgggaacactagggcttttgaaatctggggccaagggacaatggtcaccgtctcttta

SEQ ID NO: 1185 - protein, 118 aa, Homo sapiens
QVQLVQSGAEVKQPGASVKVSCRASGYALTSFYVHWVRQAPGQGLDWMGIIKPSGGYTIYAQNLQGRVTMTRDTSTNTFYVELSSLRSEDTALYYCAISGNTRAFEIWGQGTMVTVSL

SEQ ID NO: 1186 - protein, 8 aa, Homo sapiens
GYALTSFY

SEQ ID NO: 1187 - protein, 8 aa, Homo sapiens
IKPSGGYT

SEQ ID NO: 1188 - protein, 11 aa, Homo sapiens
AISGNTRAFEI

SEQ ID NO: 1189 - DNA, 330 bp, Homo sapiens; identical to SEQ ID NO: 1109

SEQ ID NO: 1190 - protein, 110 aa, Homo sapiens; identical to SEQ ID NO: 1110

SEQ ID NO: 1191 - protein, 8 aa, Homo sapiens
SSNIGNNF

SEQ ID NO: 1192 - skipped

SEQ ID NO: 1193 - protein, 11 aa, Homo sapiens
GTWDSSRSAVL

SEQ ID NO: 1194 - DNA, 354 bp, Homo sapiens
caggtgcaactggtgcagtctggggctgaggtgaagcagcctggggcctcagtgaaggtttcctgcagggcatctggatacgccctcaccaacttctatattcactgggtgcgacaggcccctggacaagggcttgagtggatgggcataatcaaacccagtggtggtgacacaatctacgctcagaatctccagggcagagtcaccatgaccagggacacgtccacggacacattctacgtggaactgaacagcctgagatctgaggacacggccctatattactgtgcgatcagtgggaacactagggcttttgaaatctggggccaagggacaatggtcaccgtctcttta

SEQ ID NO: 1195 - protein, 118 aa, Homo sapiens
QVQLVQSGAEVKQPGASVKVSCRASGYALTNFYIHWVRQAPGQGLEWMGIIKPSGGDTIYAQNLQGRVTMTRDTSTDTFYVELNSLRSEDTALYYCAISGNTRAFEIWGQGTMVTVSL

SEQ ID NO: 1196 - protein, 8 aa, Homo sapiens
GYALTNFY

SEQ ID NO: 1197 - protein, 8 aa, Homo sapiens
IKPSGGDT

SEQ ID NO: 1198 - protein, 11 aa, Homo sapiens
AISGNTRAFEI

SEQ ID NO: 1199 - DNA, 330 bp, Homo sapiens; identical to SEQ ID NO: 1109

SEQ ID NO: 1200 - protein, 110 aa, Homo sapiens; identical to SEQ ID NO: 1110

SEQ ID NO: 1201 - protein, 8 aa, Homo sapiens
SSNIGNNF

SEQ ID NO: 1202 - skipped

SEQ ID NO: 1203 - protein, 11 aa, Homo sapiens
GTWDSSRSAVL

SEQ ID NO: 1204 - DNA, 354 bp, Homo sapiens
caggtgcaattggtgcagtctggggctgaggtgaagcagcctggggcctcagtgaaggtttcctgcagggcatctggatacgccctcaccagcttctatgttcactgggtgcgacaggcccctggacaagggcttgagtggatgggcataatcaaacccagtggtggtgacacaatctacgctcagaatctccagggcagagtcaccatgaccagggacacgtccacgaacacattctacgtggaactgagcagcctgagatctgaggacacggccctatattactgtgcgatcagtgggaacactagggcttttgaaatctggggccaagggacaatggtcaccgtctcttta

SEQ ID NO: 1205 - protein, 118 aa, Homo sapiens; identical to SEQ ID NO: 1105

SEQ ID NO: 1206 - protein, 8 aa, Homo sapiens
GYALTSFY

SEQ ID NO: 1207 - protein, 8 aa, Homo sapiens
IKPSGGDT

SEQ ID NO: 1208 - protein, 11 aa, Homo sapiens
AISGNTRAFEI

SEQ ID NO: 1209 - DNA, 330 bp, Homo sapiens; identical to SEQ ID NO: 1109

SEQ ID NO: 1210 - protein, 110 aa, Homo sapiens; identical to SEQ ID NO: 1110

SEQ ID NO: 1211 - protein, 8 aa, Homo sapiens
SSNIGNNF

SEQ ID NO: 1212 - skipped

SEQ ID NO: 1213 - protein, 11 aa, Homo sapiens
GTWDSSRSAVL

SEQ ID NO: 1214 - DNA, 354 bp, Homo sapiens
caggtgcaactggtgcagtctggggctgaggtgaagcagcctggggcctcagtgaaggtttcctgcagggcatctggatacgccctcaccagactctatgttcactgggtgcggcaggcccctggacaagggcttgagtggatgggcataatcaaacccagtggtggtgacacaatctgcgctcagaatctccagggcagagtcaccctgaccagggacacgtccacgaacacattctacgtggaactgaacagcctgagatctgaggacacggccctatattactgtgcgatcagtgggaacactagggcttttgaaatctggggccaagggacaatggtcaccgtctcttta

SEQ ID NO: 1215 - protein, 118 aa, Homo sapiens
QVQLVQSGAEVKQPGASVKVSCRASGYALTRLYVHWVRQAPGQGLEWMGIIKPSGGDTICAQNLQGRVTLTRDTSTNTFYVELNSLRSEDTALYYCAISGNTRAFEIWGQGTMVTVSL

SEQ ID NO: 1216 - protein, 8 aa, Homo sapiens
GYALTRLY

SEQ ID NO: 1217 - protein, 8 aa, Homo sapiens
IKPSGGDT

SEQ ID NO: 1218 - protein, 11 aa, Homo sapiens
AISGNTRAFEI

SEQ ID NO: 1219 - DNA, 330 bp, Homo sapiens
cagtctgtgttgacgcagccgccctcagtgtctgcggccccaggacagaaggtcaccatctcctgctctggaagcagctccaacattgggaataattttgtatcctggtaccagcagctcccaggaatggtccccaaactcctcatttatgccaataataagcgaccctcagggattcctgaccgattctctggctccaggtctggcacgtcagccaccctgggcatcaccggactccagactggggacgaggccgattattactgcggaacttgggatagtagtcggagtgcggtgcttttcggcggagggaccaagatgaccgtccta

SEQ ID NO: 1220 - protein, 110 aa, Homo sapiens; identical to SEQ ID NO: 1110

SEQ ID NO: 1221 - protein, 8 aa, Homo sapiens
SSNIGNNF

SEQ ID NO: 1222 - skipped

SEQ ID NO: 1223 - protein, 11 aa, Homo sapiens
GTWDSSRSAVL

SEQ ID NO: 1224 - DNA, 351 bp, Homo sapiens
cagatgcagctggtacagtctggggctgaggtgaagaagcctggggcctcagtgaagttttcctgcaagacatctggatacaccttcaccaactactatatggtctgggtgcgacaggcccctggacaaggacttgagtggatgggcataatcaaacctagtggtggtaacacaatctatgcacagaagttccagggcagagtcaccatgaccagggacacgtccacgaacacagtctacatggacctgaccagtctgagatctgaagacacggccgtatattattgtgcgagaactggggatagggcttttgatgtctggggccaagggacaatggtcaccgtctcttca

SEQ ID NO: 1225 - protein, 117 aa, Homo sapiens
QMQLVQSGAEVKKPGASVKFSCKTSGYTFTNYYMVWVRQAPGQGLEWMGIIKPSGGNTIYAQKFQGRVTMTRDTSTNTVYMDLTSLRSEDTAVYYCARTGDRAFDVWGQGTMVTVSS

SEQ ID NO: 1226 - protein, 8 aa, Homo sapiens
GYTFTNYY

SEQ ID NO: 1227 - protein, 8 aa, Homo sapiens
IKPSGGNT

SEQ ID NO: 1228 - protein, 10 aa, Homo sapiens
ARTGDRAFDV

SEQ ID NO: 1229 - DNA, 330 bp, Homo sapiens
cagtctgtgttgacgcagccgccctcagtgtctgcggccccaggacagaaggtcaccatctcctgctctggaagcagctccaacattgggaataattatgtctcctggtaccagcagctcccaggaacagcccccaaactcctcatttatgacaataataagcgcccctcagggattcctgaccgattctctggctccaagtctggcacgtcagccaccctgggcatcaccggactccagactggggacgaggccgattattactgcggaacatgggatagcagcctgggtgctggggtgttcggcggagggaccaaactgaccgtccta

SEQ ID NO: 1230 - protein, 110 aa, Homo sapiens
QSVLTQPPSVSAAPGQKVTISCSGSSSNIGNNYVSWYQQLPGTAPKLLIYDNNKRPSGIPDRFSGSKSGTSATLGITGLQTGDEADYYCGTWDSSLGAGVFGGGTKLTVL

SEQ ID NO: 1231 - protein, 8 aa, Homo sapiens
SSNIGNNY

SEQ ID NO: 1232 - skipped

SEQ ID NO: 1233 - protein, 11 aa, Homo sapiens
GTWDSSLGAGV

SEQ ID NO: 1234 - DNA, 351 bp, Homo sapiens
cagattcagttggtgcagtctggggctgaggtgaagaagcctggggcctcagtgaagttttcctgcaagacatctggatacaccttcaccagctactatatggtctgggtgcgacaggcccctggacaaggacttgagtggatgggcataatcaaacctagtggtggtaacacaatctacgcacagaagttccagggcagagtcaccatgaccagggacacgtccacgaacacagtctacatggacctgagcagtctgagatctgaggacacggccgtgtattattgtgcgagaactggggatagggcttttgatgtctggggccacgggacaatgatcaccgtctcttca

SEQ ID NO: 1235 - protein, 117 aa, Homo sapiens
QIQLVQSGAEVKKPGASVKFSCKTSGYTFTSYYMVWVRQAPGQGLEWMGIIKPSGGNTIYAQKFQGRVTMTRDTSTNTVYMDLSSLRSEDTAVYYCARTGDRAFDVWGHGTMITVSS

SEQ ID NO: 1236 - protein, 8 aa, Homo sapiens
GYTFTSYY

SEQ ID NO: 1237 - protein, 8 aa, Homo sapiens
IKPSGGNT

SEQ ID NO: 1238 - protein, 10 aa, Homo sapiens
ARTGDRAFDV

SEQ ID NO: 1239 - DNA, 330 bp, Homo sapiens
cagtctgtattgacgcagccgccctcagtgtctgcggccccaggacagaaggtcaccatctcctgctctggaagcagctccaacattgggaataattttgtatcctggtaccaacagttcccaggaacagcccccaaactcctcatttatgacaataataagcgaccctcagggattcctgaccgattctctggctccaagtctggcacgtcagccaccctgggcatcaccggactccagactggggacgaggccgattattactgcggaacatgggatagcagcctgggtgctggggtgttcggcggagggaccaagctgaccgtccta

SEQ ID NO: 1240 - protein, 110 aa, Homo sapiens
QSVLTQPPSVSAAPGQKVTISCSGSSSNIGNNFVSWYQQFPGTAPKLLIYDNNKRPSGIPDRFSGSKSGTSATLGITGLQTGDEADYYCGTWDSSLGAGVFGGGTKLTVL

SEQ ID NO: 1241 - protein, 8 aa, Homo sapiens
SSNIGNNF

SEQ ID NO: 1242 - skipped

SEQ ID NO: 1243 - protein, 11 aa, Homo sapiens
GTWDSSLGAGV

SEQ ID NO: 1244 - DNA, 351 bp, Homo sapiens
cagattcagttggtgcagtctggggctgaggtgaagaagcctggggcctcagtgaaactttcctgcaagacatctggatacaccttcaccagctactatatggtctgggtgcgacaggcccctggacaaggacttgagtggatgggcataatcaaacctagtggtggtaacacaatcttcgcacagaagttccagggcagagtcaccatgaccagggacacgtccacgaacacagtctacatggacctgaacagtctgagatctgaggacacggccgtctattattgtgcgagaactggagatagggcttttgatgtctggggccacgggacaatggtcaccgtgtcttca

SEQ ID NO: 1245 - protein, 117 aa, Homo sapiens
QIQLVQSGAEVKKPGASVKLSCKTSGYTFTSYYMVWVRQAPGQGLEWMGIIKPSGGNTIFAQKFQGRVTMTRDTSTNTVYMDLNSLRSEDTAVYYCARTGDRAFDVWGHGTMVTVSS

SEQ ID NO: 1246 - protein, 8 aa, Homo sapiens
GYTFTSYY

SEQ ID NO: 1247 - protein, 8 aa, Homo sapiens
IKPSGGNT

SEQ ID NO: 1248 - protein, 10 aa, Homo sapiens
ARTGDRAFDV

SEQ ID NO: 1249 - DNA, 330 bp, Homo sapiens
cagtctgtgttgacgcagccgccctcagtgtctgcggccccaggacagaaggtcaccatctcctgctctggaagcagctccaacattgggaataattatgtatcctggtaccagcagttcccaggaacagcccccaaactcctcatttatgacaataataagcgaccctcagggattcctgaccgattctctggctccaagtctggcacgtcagccaccctgggcatcaccggactccagactggggacgaggccgattattactgcggaacatgggatagcagcctgggtgctggggtgttcggcggagggaccaaggtgaccgtccta

SEQ ID NO: 1250 - protein, 110 aa, Homo sapiens
QSVLTQPPSVSAAPGQKVTISCSGSSSNIGNNYVSWYQQFPGTAPKLLIYDNNKRPSGIPDRFSGSKSGTSATLGITGLQTGDEADYYCGTWDSSLGAGVFGGGTKVTVL

SEQ ID NO: 1251 - protein, 8 aa, Homo sapiens
SSNIGNNY

SEQ ID NO: 1252 - skipped

SEQ ID NO: 1253 - protein, 11 aa, Homo sapiens
GTWDSSLGAGV

SEQ ID NO: 1254 - DNA, 351 bp, Homo sapiens
cagatgcaattggtgcaatctggggctgaggtgaagaagcctggggcctcagtgaagatttcctgcaagacatctggatacaccttcaccaactactatatggtctgggtgcgacaggcccctggacaaggacttgagtggatgggcataatcaaacctagtggtggtaacacgatctacgcacagaagttccagggcagagtcaccatgaccagggacacgtccacgaacacagtctatttggacctgagcagtctgagatctgaggacacggccgtctattattgtgcgagaactgggaatagggcttttgatgtctggggccacgggacaatggtcaccgtctcttca

SEQ ID NO: 1255 - protein, 117 aa, Homo sapiens
QMQLVQSGAEVKKPGASVKISCKTSGYTFTNYYMVWVRQAPGQGLEWMGIIKPSGGNTIYAQKFQGRVTMTRDTSTNTVYLDLSSLRSEDTAVYYCARTGNRAFDVWGHGTMVTVSS

SEQ ID NO: 1256 - protein, 8 aa, Homo sapiens
GYTFTNYY

SEQ ID NO: 1257 - protein, 8 aa, Homo sapiens
IKPSGGNT

SEQ ID NO: 1258 - protein, 10 aa, Homo sapiens
ARTGNRAFDV

SEQ ID NO: 1259 - DNA, 330 bp, Homo sapiens
cagtctgtgttgacgcagccgccctcagtgtctgcggccccaggacagaaggtcaccatctcctgctctggaagcagctccaacattgggaataattttgtttcctggtaccagcagttcccaggaacagcccccaaactcctcatttatgacaataataagcgaccctcagggattcctgaccgattctctggctccaagtctggcacgtcagccaccctgggcatcaccggactccagactggggacgaggccgattattactgcggaacatgggatagcagcctgggtgctggggtgttcggcggagggaccaagctgaccgtccta

SEQ ID NO: 1260 - protein, 110 aa, Homo sapiens; identical to SEQ ID NO: 1240

SEQ ID NO: 1261 - protein, 8 aa, Homo sapiens
SSNIGNNF

SEQ ID NO: 1262 - skipped

SEQ ID NO: 1263 - protein, 11 aa, Homo sapiens
GTWDSSLGAGV

SEQ ID NO: 1264 - DNA, 351 bp, Homo sapiens
cagatacagctggtgcagtctggggctgaggtgaggaagcctggggcctcagtgaggttttcctgcaagacatctggatacattttcaccaactactatatggtctgggtgcgacaggcccctggacaaggacttgagtggatgggcataatcaaacctagtggaggtaacacaatctacgcacagaagttccagggcagagtcaccatgaccagggacacgtccactaacacagtctacatggacctgaataatctgagatctgaggacacggccgtgtatttttgtgcgagaactggtgatagggcttttgatgtctggggccaagggacaatggtcaccgtctcttca

SEQ ID NO: 1265 - protein, 117 aa, Homo sapiens
QIQLVQSGAEVRKPGASVRFSCKTSGYIFTNYYMVWVRQAPGQGLEWMGIIKPSGGNTIYAQKFQGRVTMTRDTSTNTVYMDLNNLRSEDTAVYFCARTGDRAFDVWGQGTMVTVSS

SEQ ID NO: 1266 - protein, 8 aa, Homo sapiens
GYIFTNYY

SEQ ID NO: 1267 - protein, 8 aa, Homo sapiens
IKPSGGNT

SEQ ID NO: 1268 - protein, 10 aa, Homo sapiens
ARTGDRAFDV

SEQ ID NO: 1269 - DNA, 330 bp, Homo sapiens
cagtctgtgttgacgcagccgccctcaatgtctgcggccccaggacagaaggtcaccatctcctgctctggaaacagctccaacattgggaataattttgtatcctggtaccggcagttccccggaacagcccccaaactcctcatttatgacaataataagcgaccctcagggattcctgaccgattctctggctccaagtctggcacgtcagccaccctgggcatcaccggactccagactggggacgaggccgattattactgcgggacatgggatagcagcctgagtgctggggtgttcggcggagggaccaagctgaccgtccta

SEQ ID NO: 1270 - protein, 110 aa, Homo sapiens
QSVLTQPPSMSAAPGQKVTISCSGNSSNIGNNFVSWYRQFPGTAPKLLIYDNNKRPSGIPDRFSGSKSGTSATLGITGLQTGDEADYYCGTWDSSLSAGVFGGGTKLTVL

SEQ ID NO: 1271 - protein, 8 aa, Homo sapiens
SSNIGNNF

SEQ ID NO: 1272 - skipped

SEQ ID NO: 1273 - protein, 11 aa, Homo sapiens
GTWDSSLSAGV

SEQ ID NO: 1274 - DNA, 351 bp, Homo sapiens
cagatgcagttggtgcagtctggggctgaggtgaagaagcctggggcctcagtgaagttttcctgcaagacatctggatacaccttcaccaacttctatatggtctgggtgcgacaggcccctggacaaggacttgagtggatgggcataatcaaacctagtggtggtgacacaatctacgcacagaagttccagggcagagtcaccatgaccagggacacgtccacgaacacagtctacatggacctgaacagtctgacatctgaggacacggccgtatattattgtgcgagaattgggaatagggcttttgatgtctggggccacgggacaatggtcaccgtctcttca

SEQ ID NO: 1275 - protein, 117 aa, Homo sapiens
QMQLVQSGAEVKKPGASVKFSCKTSGYTFTNFYMVWVRQAPGQGLEWMGIIKPSGGDTIYAQKFQGRVTMTRDTSTNTVYMDLNSLTSEDTAVYYCARIGNRAFDVWGHGTMVTVSS

SEQ ID NO: 1276 - protein, 8 aa, Homo sapiens
GYTFTNFY

SEQ ID NO: 1277 - protein, 8 aa, Homo sapiens
IKPSGGDT

SEQ ID NO: 1278 - protein, 10 aa, Homo sapiens
ARIGNRAFDV

SEQ ID NO: 1279 - DNA, 330 bp, Homo sapiens
cagtctgtgttgacgcagccgccctcagtgtctgcggccccaggacagaaagtcaccatctcctgctctggaagcagctccaatattgggaataattttgtatcctggtaccagcagttttcaggaacagcccccaaactcctcatttatgacaattctaagcgaccctcagggattcctgaccgattctctggctccaagtctggcacgtcagccaccctgggcatcaccggactccagactggggacgaggccgattattactgcggaacatgggatagcagcctgggtgctggggtgttcggcggagggaccaaactgaccgtccta

SEQ ID NO: 1280 - protein, 110 aa, Homo sapiens
QSVLTQPPSVSAAPGQKVTISCSGSSSNIGNNFVSWYQQFSGTAPKLLIYDNSKRPSGIPDRFSGSKSGTSATLGITGLQTGDEADYYCGTWDSSLGAGVFGGGTKLTVL

SEQ ID NO: 1281 - protein, 8 aa, Homo sapiens
SSNIGNNF

SEQ ID NO: 1282 - skipped

SEQ ID NO: 1283 - protein, 11 aa, Homo sapiens
GTWDSSLGAGV

SEQ ID NO: 1284 - DNA, 351 bp, Homo sapiens
cagattcagttggtgcagtctggggctgaggtgaagaagcctggggcctcagtgaagttttcctgcaagacatctggatacaccttcaccagctactatatggtctgggtgcgacaggcccctggacaaggacttgagtggatgggcataatcaaacctagtggtggtaacacaatctacgcacagaagttccagggcagagtcaccatgaccagggacacgtccacgaacacagtctacatggacctgaacagtctgaaatctgaggacacggccgtctattattgtgcgagaactggagattgggcttttgatgtctggggccacgggacaatggtcaccgtgtcttca

SEQ ID NO: 1285 - protein, 117 aa, Homo sapiens
QIQLVQSGAEVKKPGASVKFSCKTSGYTFTSYYMVWVRQAPGQGLEWMGIIKPSGGNTIYAQKFQGRVTMTRDTSTNTVYMDLNSLKSEDTAVYYCARTGDWAFDVWGHGTMVTVSS

SEQ ID NO: 1286 - protein, 8 aa, Homo sapiens
GYTFTSYY

SEQ ID NO: 1287 - protein, 8 aa, Homo sapiens
IKPSGGNT

SEQ ID NO: 1288 - protein, 10 aa, Homo sapiens
ARTGDWAFDV

SEQ ID NO: 1289 - DNA, 330 bp, Homo sapiens
cagtctgtgttgacgcagccgccctcagtgtctgcggccccaggacagaaggtcaccatctcctgctctggaagcagctccaacattgggaataattatgtatcctggtaccagcagttcccaggaacagcccccaaactcctcatttatgacaataataagcgaccctcagggattcctgaccgattctctggctccaagtctggcacgtcagccaccctgggcatcaccggactccagactggggacgaggccgattattactgcggaacatgggatagcagcctgggtgctggggtgttcggcggagggaccaaactgaccgtccta

SEQ ID NO: 1290 - protein, 110 aa, Homo sapiens
QSVLTQPPSVSAAPGQKVTISCSGSSSNIGNNYVSWYQQFPGTAPKLLIYDNNKRPSGIPDRFSGSKSGTSATLGITGLQTGDEADYYCGTWDSSLGAGVFGGGTKLTVL

SEQ ID NO: 1291 - protein, 8 aa, Homo sapiens
SSNIGNNY

SEQ ID NO: 1292 - skipped

SEQ ID NO: 1293 - protein, 11 aa, Homo sapiens
GTWDSSLGAGV

SEQ ID NO: 1294 - DNA, 351 bp, Homo sapiens
cagatacaactggtgcagtctggggctgaggtgaagaagcctggggcctctgtgaggttttcctgcaagacatctggatacaccttcaccaactactatatggtctgggtgcgacaggcccctggacaaggacttgagtggatgggcataattaaacctagtggtggtaacacaatctacgcacagaacttccagggcagagtcaccatgaccagggacacgtccacgaacacagtctacatggacctgaggactctgagatctgaggacacggccgtttattattgtgcgagaactggtgatagggcttttgatgtctggggccaagggacaatggtcaccgtctcttca

SEQ ID NO: 1295 - protein, 117 aa, Homo sapiens
QIQLVQSGAEVKKPGASVRFSCKTSGYTFTNYYMVWVRQAPGQGLEWMGIIKPSGGNTIYAQNFQGRVTMTRDTSTNTVYMDLRTLRSEDTAVYYCARTGDRAFDVWGQGTMVTVSS

SEQ ID NO: 1296 - protein, 8 aa, Homo sapiens
GYTFTNYY

SEQ ID NO: 1297 - protein, 8 aa, Homo sapiens
IKPSGGNT

SEQ ID NO: 1298 - protein, 10 aa, Homo sapiens
ARTGDRAFDV

SEQ ID NO: 1299 - DNA, 330 bp, Homo sapiens
cagtctgtgttgacgcagccgccctcagtgtctgcggccccaggacagaaggtcaccatctcctgctctggaagcagctccaacattgggaataattttgtatcctggtaccagcagttcccaggaacagcccccaaactcctcatttatgacaataataagcgaccctcagggattcctgaccgattctctggctccaagtctggcacgtcagccaccctgggcatcaccggactccagactggggacgaggccgattattactgcggaacatgggatagcagcctgggtgctggggtgttcggcggagggaccaagctgaccgtccta

SEQ ID NO: 1300 - protein, 110 aa, Homo sapiens; identical to SEQ ID NO: 1240

SEQ ID NO: 1301 - protein, 8 aa, Homo sapiens
SSNIGNNF

SEQ ID NO: 1302 - skipped

SEQ ID NO: 1303 - protein, 11 aa, Homo sapiens
GTWDSSLGAGV

SEQ ID NO: 1304 - DNA, 351 bp, Homo sapiens
cagatgcagttggtgcagtctggggctgaggtgaagaagcctggggcctcagtgaaaatttcctgcaagacatctggatacaccttcatcaactactatatggtctgggtgcgacaggcccctggacaaggacttgagtggatgggcataatcaaacctagtggtggtaatacgatctacgcacagaagttccagggcagagtcaccatgaccagggacacgtccacgagcacagtctatatggacctgagcagtctgagatctgaggacacggccgtgtattattgtgcgagaactggggatagggcttttgatgtctggggccacgggacaatggtcaccgtctcttca

SEQ ID NO: 1305 - protein, 117 aa, Homo sapiens
QMQLVQSGAEVKKPGASVKISCKTSGYTFINYYMVWVRQAPGQGLEWMGIIKPSGGNTIYAQKFQGRVTMTRDTSTSTVYMDLSSLRSEDTAVYYCARTGDRAFDVWGHGTMVTVSS

SEQ ID NO: 1306 - protein, 8 aa, Homo sapiens
GYTFINYY

SEQ ID NO: 1307 - protein, 8 aa, Homo sapiens
IKPSGGNT

SEQ ID NO: 1308 - protein, 10 aa, Homo sapiens
ARTGDRAFDV

SEQ ID NO: 1309 - DNA, 330 bp, Homo sapiens
cagtctgtgttgacgcagccgccctcagtgtctgcggccccaggacagaaggtcaccatctcctgctctggaagcagctccaacattgggaataattatgtttcctggtaccagcagttcccaggaacagcccccaaactcctcatttatgacaatcataagcgaccctcagggattcctgaccgattctctgcctccaagtctggcacgtcagccaccctgggcatcaccggactcctgactggggacgaggccgattattactgcggaacatgggatagcggcctgggtgctggggtgttcggcggagggaccaagctgaccgtccta

SEQ ID NO: 1310 - protein, 110 aa, Homo sapiens
QSVLTQPPSVSAAPGQKVTISCSGSSSNIGNNYVSWYQQFPGTAPKLLIYDNHKRPSGIPDRFSASKSGTSATLGITGLLTGDEADYYCGTWDSGLGAGVFGGGTKLTVL

SEQ ID NO: 1311 - protein, 8 aa, Homo sapiens
SSNIGNNY

SEQ ID NO: 1312 - skipped

SEQ ID NO: 1313 - protein, 11 aa, Homo sapiens
GTWDSGLGAGV

SEQ ID NO: 1314 - DNA, 351 bp, Homo sapiens
cagatacaactggtgcagtctggggctgaggtgaagaagcctggggcctcagtgaagttttcctgcaagacatctggatacacctttaccaactactatatggtctgggtgcgacaggcccctggacaaggacttgagtggatgggcataatcaaacctagaggtggtgacacaatctacgcacagaacttccagggcagagtcaccatgaccagggacacgtccacgaacacagtctatatggacctgaggagtctgagatctgaggacacggccgtgtattattgtgcgagaactggtgatagggcttttgatgtctggggccaagggacaatggtcaccgtctcttca

SEQ ID NO: 1315 - protein, 117 aa, Homo sapiens
QIQLVQSGAEVKKPGASVKFSCKTSGYTFTNYYMVWVRQAPGQGLEWMGIIKPRGGDTIYAQNFQGRVTMTRDTSTNTVYMDLRSLRSEDTAVYYCARTGDRAFDVWGQGTMVTVSS

SEQ ID NO: 1316 - protein, 8 aa, Homo sapiens
GYTFTNYY

SEQ ID NO: 1317 - protein, 8 aa, Homo sapiens
IKPRGGDT

SEQ ID NO: 1318 - protein, 10 aa, Homo sapiens
ARTGDRAFDV

SEQ ID NO: 1319 - DNA, 330 bp, Homo sapiens
cagtctgtgttgacgcagccgccctcagtgtctgcggccccaggacagaaggtcaccatctcctgctctggaagcagctccaacattgggaataattttgtatcctggtacgagcagttcccaggaacagcccccaaactcctcatttatgacaataataagcgaccctcagggattcctgaccgattctctggctccaagtctggcacgtcagccaccctgggcatcaccggactccagactggggacgaggccgattattactgcggaacatgggatagcagcctgggtgctggggtgttcggcggagggaccaagctgaccgtccta

SEQ ID NO: 1320 - protein, 110 aa, Homo sapiens
QSVLTQPPSVSAAPGQKVTISCSGSSSNIGNNFVSWYEQFPGTAPKLLIYDNNKRPSGIPDRFSGSKSGTSATLGITGLQTGDEADYYCGTWDSSLGAGVFGGGTKLTVL

SEQ ID NO: 1321 - protein, 8 aa, Homo sapiens
SSNIGNNF

SEQ ID NO: 1322 - skipped

SEQ ID NO: 1323 - protein, 11 aa, Homo sapiens
GTWDSSLGAGV

SEQ ID NO: 1324 - DNA, 351 bp, Homo sapiens
cagatacaactggtgcagtctggggctgaggtgaagaagcctggggcctcagtgaggttttcctgcaagacatctggatacaccttcaccaactactatatggtctgggtgcgacaggcccctggacaaggacttgagtggatgggcatcatcaaacctagtggtggtaacaccatctacgcacagaacttccagggcagagtctccatgaccagggacacgtccacgagcacagtctacatggacctgaggagtctgacatctgaggacacggccgtgtattattgtgcgagaactggtgatagggcttttgatgtctggggccaagggacaatggtcaccgtctcttca

SEQ ID NO: 1325 - protein, 117 aa, Homo sapiens
QIQLVQSGAEVKKPGASVRFSCKTSGYTFTNYYMVWVRQAPGQGLEWMGIIKPSGGNTIYAQNFQGRVSMTRDTSTSTVYMDLRSLTSEDTAVYYCARTGDRAFDVWGQGTMVTVSS

SEQ ID NO: 1326 - protein, 8 aa, Homo sapiens
GYTFTNYY

SEQ ID NO: 1327 - protein, 8 aa, Homo sapiens
IKPSGGNT

SEQ ID NO: 1328 - protein, 10 aa, Homo sapiens
ARTGDRAFDV

SEQ ID NO: 1329 - DNA, 330 bp, Homo sapiens
cagtctgtgttgacgcagccgccctcagtgtctgcggccccaggacagaaggtcaccatctcctgctctggaagcagctccaacattgggaataattttgtatcctggtaccagcagtttccaggaacagcccccaaactcctcatttatgacaataataagcgaccctcagggattcctgaccgattctctggctccaagtctggcacgtcagccaccctgggcatcaccggactccagactggggacgaggccgattattactgcggaacatgggatagcagcctgggtgctggggtgttcggcggagggaccaagctgaccgtccta

SEQ ID NO: 1330 - protein, 110 aa, Homo sapiens; identical to SEQ ID NO: 1240

SEQ ID NO: 1331 - protein, 8 aa, Homo sapiens
SSNIGNNF

SEQ ID NO: 1332 - skipped

SEQ ID NO: 1333 - protein, 11 aa, Homo sapiens
GTWDSSLGAGV

SEQ ID NO: 1334 - DNA, 351 bp, Homo sapiens
cagatacagttggtgcagtctgggcctgaggtgaagaagcctggggcctcagtgaagatttcctgcaagacatctggatacaccttcaccaactactatatggtctgggtgcgacaggcccctggacaaggacttgagtggatgggcataatcaaacctagtggtggtaacacgatctacgcacagaagttccagggcagagtcaccatgaccagggacacgtccacgaacacagtctatttggacctgagcagtctgagatctgaggacacggccgtgtattattgtgcgagaactggggatagggcttttgatgtctggggccacgggacaatggtcaccgtctcttca

SEQ ID NO: 1335 - protein, 117 aa, Homo sapiens
QIQLVQSGPEVKKPGASVKISCKTSGYTFTNYYMVWVRQAPGQGLEWMGIIKPSGGNTIYAQKFQGRVTMTRDTSTNTVYLDLSSLRSEDTAVYYCARTGDRAFDVWGHGTMVTVSS

SEQ ID NO: 1336 - protein, 8 aa, Homo sapiens
GYTFTNYY

SEQ ID NO: 1337 - protein, 8 aa, Homo sapiens
IKPSGGNT

SEQ ID NO: 1338 - protein, 10 aa, Homo sapiens
ARTGDRAFDV

SEQ ID NO: 1339 - DNA, 330 bp, Homo sapiens
cagtctgtgttgacgcagccgccctcagtgtctgcggccccaggacagaaggtcaccatctcctgctctggaagcagctccaacattgggaataattatgtttcctggtaccagaagttcccaggaacagcccccaaactcctcatttatgacaataataagcgaccctcagggattcctgaccgattctctggctccaagtctggcacgtcagccaccctgggcatcaccggactccagactggggacgaggccgattattactgcggaacatgggatagcagcctgggtgctggggtgttcggcggagggaccaagctgaccgtccta

SEQ ID NO: 1340 - protein, 110 aa, Homo sapiens
QSVLTQPPSVSAAPGQKVTISCSGSSSNIGNNYVSWYQKFPGTAPKLLIYDNNKRPSGIPDRFSGSKSGTSATLGITGLQTGDEADYYCGTWDSSLGAGVFGGGTKLTVL

SEQ ID NO: 1341 - protein, 8 aa, Homo sapiens
SSNIGNNY

SEQ ID NO: 1342 - skipped

SEQ ID NO: 1343 - protein, 11 aa, Homo sapiens
GTWDSSLGAGV

SEQ ID NO: 1344 - DNA, 351 bp, Homo sapiens
cagattcagttggtgcagtctggggctgaggtgaagaagcctggggcctcagtgaagctttcctgcaagacatctggatacaccttcaccagctactacatggtctgggtgcgacaggcccctggacaaggacttgagtggatgggcataatcaaacctagtggtggtaacacactcttcgaacagaagtttcagggtagagtcatcatgaccagggacacgtccacgaacacagtctacatggacctgaacagtctgagatctgaggacacggccgtctattattgtgcgagaactggagatagggcttttgatgtctggggccacgggacaatggtcaccgtgtcttca

SEQ ID NO: 1345 - protein, 117 aa, Homo sapiens
QIQLVQSGAEVKKPGASVKLSCKTSGYTFTSYYMVWVRQAPGQGLEWMGIIKPSGGNTLFEQKFQGRVIMTRDTSTNTVYMDLNSLRSEDTAVYYCARTGDRAFDVWGHGTMVTVSS

SEQ ID NO: 1346 - protein, 8 aa, Homo sapiens
GYTFTSYY

SEQ ID NO: 1347 - protein, 8 aa, Homo sapiens
IKPSGGNT

SEQ ID NO: 1348 - protein, 10 aa, Homo sapiens
ARTGDRAFDV

SEQ ID NO: 1349 - DNA, 330 bp, Homo sapiens
cagtctgtgttgacgcagccgccctcagtgtctgcggccccaggacagaaggtcaccatctcctgctctggaagcagctccaacattgggaataattatgtatcctggtaccagcagttcccaggaacagcccccaaactcctcatttatgacaataataagcgaccctcagggattcctgaccgattctctggctccaagtctggcacgtcagccaccctgggcatcaccggactccagactggggacgaggccgattattactgcggaacatgggatagcagcctgggtgctggggtgttcggcggagggaccaagctgaccgtccta

SEQ ID NO: 1350 - protein, 110 aa, Homo sapiens; identical to SEQ ID NO: 1290

SEQ ID NO: 1351 - protein, 8 aa, Homo sapiens
SSNIGNNY

SEQ ID NO: 1352 - skipped

SEQ ID NO: 1353 - protein, 11 aa, Homo sapiens
GTWDSSLGAGV

SEQ ID NO: 1354 - DNA, 351 bp, Homo sapiens
cagatgcaattggtgcagtctggggctgaggtgaagaagcctggggcctcagtgaagatttcctgcaagacatctggatacaccttcaccaactactatatggtctgggtgcgacaggcccctggacaaggacttgagtggatgggcataatcaaacctagtggtggtaacacgatctacgcacagaagttccagggcagagtcaccgtgaccagggacacgtccacgaacacagtctatttggacctgagcagtcttacatctgaagacacggccgtatattattgtgcgagaactggggatagggcttttgatgtctggggccatgggacactggtcaccgtctcttca

SEQ ID NO: 1355 - protein, 117 aa, Homo sapiens
QMQLVQSGAEVKKPGASVKISCKTSGYTFTNYYMVWVRQAPGQGLEWMGIIKPSGGNTIYAQKFQGRVTVTRDTSTNTVYLDLSSLTSEDTAVYYCARTGDRAFDVWGHGTLVTVSS

SEQ ID NO: 1356 - protein, 8 aa, Homo sapiens
GYTFTNYY

SEQ ID NO: 1357 - protein, 8 aa, Homo sapiens
IKPSGGNT

SEQ ID NO: 1358 - protein, 10 aa, Homo sapiens
ARTGDRAFDV

SEQ ID NO: 1359 - DNA, 330 bp, Homo sapiens
cagtctgtgttgacgcagccgccctcagtgtctgcggccccaggacagaaggtcaccatctcctgctctggaagaagttccaacattgggaataattatgtttcctggtaccagcagttcccaggaacagcccccaaactcctcatttatgacaataataagcgaccctcagggattcctgaccgattctctggctccaagtctggcacgtcagccaccctgggcatcaccggactccagactggggacgaggccgattattactgcggaacatgggatagcagcctgggtgctggggtgttcggcggagggaccaaactgaccgtccta

SEQ ID NO: 1360 - protein, 110 aa, Homo sapiens
QSVLTQPPSVSAAPGQKVTISCSGRSSNIGNNYVSWYQQFPGTAPKLLIYDNNKRPSGIPDRFSGSKSGTSATLGITGLQTGDEADYYCGTWDSSLGAGVFGGGTKLTVL

SEQ ID NO: 1361 - protein, 8 aa, Homo sapiens
SSNIGNNY

SEQ ID NO: 1362 - skipped

SEQ ID NO: 1363 - protein, 11 aa, Homo sapiens
GTWDSSLGAGV

SEQ ID NO: 1364 - DNA, 351 bp, Homo sapiens
cagattcagttggtgcagtctggggctgaggtgaagaagcctggggcctcagtgaagttttcctgcaagacatctggatacaccttcaccagctactatatggtctgggtgcgacaggcccctggacaaggacttgagtggatgggcataatcaaacctagtggtggtaacacaatctacgcacagaagttccagggcagagtcaccatgaccagggacacgtccacgaacacagtctacatggacctgagcagtctgagatctgaggacacggccgtgtattattgtgcgagatctggggatagggcttttgatgtctggggccacgggacaatgatcaccgtctcttca

SEQ ID NO: 1365 - protein, 117 aa, Homo sapiens
QIQLVQSGAEVKKPGASVKFSCKTSGYTFTSYYMVWVRQAPGQGLEWMGIIKPSGGNTIYAQKFQGRVTMTRDTSTNTVYMDLSSLRSEDTAVYYCARSGDRAFDVWGHGTMITVSS

SEQ ID NO: 1366 - protein, 8 aa, Homo sapiens
GYTFTSYY

SEQ ID NO: 1367 - protein, 8 aa, Homo sapiens
IKPSGGNT

SEQ ID NO: 1368 - protein, 10 aa, Homo sapiens
ARSGDRAFDV

SEQ ID NO: 1369 - DNA, 330 bp, Homo sapiens
cagtctgtattgacgcagccgccctcagtgtctgcggccccaggacagaaggtcaccatctcctgctctggaagcagctccaacattgggaataattttgtgtcctggtaccaacagttcccaggaacagcccccaaactcctcatttatgacaataataagcgaccctcagggattcctgaccgcttctctggctccaagtctggcacgtcagccaccctgggcatcaccggactccagactggggacgaggccgattattactgcggaacatgggatagcagcctgggtgctggggtgttcggcggagggaccaagctgaccgtccta

SEQ ID NO: 1370 - protein, 110 aa, Homo sapiens; identical to SEQ ID NO: 1240

SEQ ID NO: 1371 - protein, 8 aa, Homo sapiens
SSNIGNNF

SEQ ID NO: 1372 - skipped

SEQ ID NO: 1373 - protein, 11 aa, Homo sapiens
GTWDSSLGAGV

SEQ ID NO: 1374 - DNA, 351 bp, Homo sapiens
cagatgcaattggtgcaatctggggctgaggtgaagaagcctggggcctcagtgaagatttcctgcaagacatctggatacaccttcaccaactactatatggtctgggtgcgacaggcccctggacaaggacttgagtggatgggcataatcaaacctagtggtggtaacacgatctacgcacacaagtttcagggcagagtcaccatgaccagggacacgtccacgaacacagtctatttggacctgagcagtctgagatctgaggacacggccgtctattattgtgccagaactggggatagggcttttgatgtctggggccacgggacaatggtcaccgtctcttca

SEQ ID NO: 1375 - protein, 117 aa, Homo sapiens
QMQLVQSGAEVKKPGASVKISCKTSGYTFTNYYMVWVRQAPGQGLEWMGIIKPSGGNTIYAHKFQGRVTMTRDTSTNTVYLDLSSLRSEDTAVYYCARTGDRAFDVWGHGTMVTVSS

SEQ ID NO: 1376 - protein, 8 aa, Homo sapiens
GYTFTNYY

SEQ ID NO: 1377 - protein, 8 aa, Homo sapiens
IKPSGGNT

SEQ ID NO: 1378 - protein, 10 aa, Homo sapiens
ARTGDRAFDV

SEQ ID NO: 1379 - DNA, 330 bp, Homo sapiens
cagtctgtgttgacgcagccgccctcagtgtctgcggccccaggacagaaggtcaccatctcctgctctggaagcagctccaacattgggaataattttgtttcctggtaccagcagttcccaggaacagcccccaaactcctcatttatgacaataataaacgaccctcagggattcctgaccgattctctggctccaagtctggcacgtcagccaccctgggcatcaccggactccagactggggacgaggccgattattactgcggaacatgggatagcagcctgggtgctggggtgttcggcggagggaccaagctgaccgtccta

SEQ ID NO: 1380 - protein, 110 aa, Homo sapiens; identical to SEQ ID NO: 1240

SEQ ID NO: 1381 - protein, 8 aa, Homo sapiens
SSNIGNNF

SEQ ID NO: 1382 - skipped

SEQ ID NO: 1383 - protein, 11 aa, Homo sapiens
GTWDSSLGAGV

SEQ ID NO: 1384 - DNA, 351 bp, Homo sapiens
cagatacaactggtgcagtctggggctgaggtgaagaagcctggggcctcagtgaagttttcctgcaagacatctggatacaccttcaccaactactatatggtctgggtgcgacaggcccctggacaaggacttgagtggatgggcataatcaaacctagtggtggtaacacaatctacgcacagaacttccaggacagagtcaccatgaccagggacacgtccacgaatacagtctacatggacctgaggagtctgagatctgaggacacggccgtgtattattgtgcgagaactggtgatagggcttttgatgtctggggccatgggacaatggtcaccgtctcttca

SEQ ID NO: 1385 - protein, 117 aa, Homo sapiens
QIQLVQSGAEVKKPGASVKFSCKTSGYTFTNYYMVWVRQAPGQGLEWMGIIKPSGGNTIYAQNFQDRVTMTRDTSTNTVYMDLRSLRSEDTAVYYCARTGDRAFDVWGHGTMVTVSS

SEQ ID NO: 1386 - protein, 8 aa, Homo sapiens
GYTFTNYY

SEQ ID NO: 1387 - protein, 8 aa, Homo sapiens
IKPSGGNT

SEQ ID NO: 1388 - protein, 10 aa, Homo sapiens
ARTGDRAFDV

SEQ ID NO: 1389 - DNA, 330 bp, Homo sapiens
cagtctgtgttgacgcagccgccctcagtgtctgcggccccaggacagaaggtcaccatctcctgctctggaagcagctccaacattggaaataattttgtatcctggtaccagcagttcccaggaacagcccccaaactcctcatttatgacaataataagcgaccctcagggattcctgaccgattctctggctccaagtctggcacgtcagccaccctgggcatcaccggactccagactggggacgaggccgattattactgcggaacatgggatagcagcctgggtgctggggtgttcggcggagggaccaagctgaccgtccta

SEQ ID NO: 1390 - protein, 110 aa, Homo sapiens; identical to SEQ ID NO: 1240

SEQ ID NO: 1391 - protein, 8 aa, Homo sapiens
SSNIGNNF

SEQ ID NO: 1392 - skipped

SEQ ID NO: 1393 - protein, 11 aa, Homo sapiens
GTWDSSLGAGV

SEQ ID NO: 1394 - DNA, 351 bp, Homo sapiens
cagatgcaattgctgcagtctggggctgaggtgaagaagcctggggcctcagtgaagatttcctgcaagacatctggatacaccttcaccaactactatatggtctgggtgcgacaggcccctggacaaggacttgagtggatgggcataatcaaacctagtggtggtaacacgatctacgcacagaagttccagggcagagtcaccatgaccagggacacgtccacgaacacagtctatttggacctgagcagtctgagatctgaggacacggccgtgtattattgtgcgagaactggggatagggcttttgatgtctggggccacgggacaatagtcaccgtctcttca

SEQ ID NO: 1395 - protein, 117 aa, Homo sapiens
QMQLLQSGAEVKKPGASVKISCKTSGYTFTNYYMVWVRQAPGQGLEWMGIIKPSGGNTIYAQKFQGRVTMTRDTSTNTVYLDLSSLRSEDTAVYYCARTGDRAFDVWGHGTIVTVSS

SEQ ID NO: 1396 - protein, 8 aa, Homo sapiens
GYTFTNYY

SEQ ID NO: 1397 - protein, 8 aa, Homo sapiens
IKPSGGNT

SEQ ID NO: 1398 - protein, 10 aa, Homo sapiens
ARTGDRAFDV

SEQ ID NO: 1399 - DNA, 330 bp, Homo sapiens
cagtctgtgttgacgcagccgccctcagtgtctgcggccccaggacagaaggtcaccatctcctgctctggaaacagctccaacattgggaataattatgtttcctggtatcagcagttcccaggaacagcccccaaactcctcatttatgacaataataagcgaccctcagggattcctgaccgattctctggctccaagtctggcacgtcagccaccctgggcatcaccggactccagactggggacgaggccgattattattgcggaacatgggatagcagcctgggtgctggggtgttcggcggagggaccaagctgaccgtccta

SEQ ID NO: 1400 - protein, 110 aa, Homo sapiens
QSVLTQPPSVSAAPGQKVTISCSGNSSNIGNNYVSWYQQFPGTAPKLLIYDNNKRPSGIPDRFSGSKSGTSATLGITGLQTGDEADYYCGTWDSSLGAGVFGGGTKLTVL

SEQ ID NO: 1401 - protein, 8 aa, Homo sapiens
SSNIGNNY

SEQ ID NO: 1402 - skipped

SEQ ID NO: 1403 - protein, 11 aa, Homo sapiens
GTWDSSLGAGV

SEQ ID NO: 1404 - DNA, 351 bp, Homo sapiens
cagatacagctggtgcagtctggggctgaggtgaagaagcctggggcctcagtgaagttttcctgcaagacatctggatacaccttcaccaactactatatggtctgggtgcgacaggcccctggacaaggacttgagtggatgggcataatcaaacctagtggtggtaacacaatctacgcacagaatttccagggcagagtcaccatgaccagggacacgtccacgaacacagtctacatggacctgaggagtctgagatctgaggacacggccgtgtattattgtgcgagaactggtgatagggcttttgatgtctggggccaagggacaatggtcaccgtctcttca

SEQ ID NO: 1405 - protein, 117 aa, Homo sapiens
QIQLVQSGAEVKKPGASVKFSCKTSGYTFTNYYMVWVRQAPGQGLEWMGIIKPSGGNTIYAQNFQGRVTMTRDTSTNTVYMDLRSLRSEDTAVYYCARTGDRAFDVWGQGTMVTVSS

SEQ ID NO: 1406 - protein, 8 aa, Homo sapiens
GYTFTNYY

SEQ ID NO: 1407 - protein, 8 aa, Homo sapiens
IKPSGGNT

SEQ ID NO: 1408 - protein, 10 aa, Homo sapiens
ARTGDRAFDV

SEQ ID NO: 1409 - DNA, 330 bp, Homo sapiens
cagtctgtgttgacgcagccgccctcagtatctgcgaccccaggacagaaggtcaccatctcctgctctggaagcagctccaacattgggaataattttgtatcctggtaccagcagttcccaggaacagcccccaaactcctcatttatgacaataataagcgaccctcagggattcctgaccgattctctggctccaagtctggcacgtcagccaccctgggcatcaccggactccagactggggacgaggccgattattactgcggaacatgggatagcagcctgggtgctggggtgttcggcggagggaccaagctgaccgtccta

SEQ ID NO: 1410 - protein, 110 aa, Homo sapiens
QSVLTQPPSVSATPGQKVTISCSGSSSNIGNNFVSWYQQFPGTAPKLLIYDNNKRPSGIPDRFSGSKSGTSATLGITGLQTGDEADYYCGTWDSSLGAGVFGGGTKLTVL

SEQ ID NO: 1411 - protein, 8 aa, Homo sapiens
SSNIGNNF

SEQ ID NO: 1412 - skipped

SEQ ID NO: 1413 - protein, 11 aa, Homo sapiens
GTWDSSLGAGV

SEQ ID NO: 1414 - DNA, 351 bp, Homo sapiens
cagatgcagctggtacagtctggggctgaggtgaagaagcctggggcctcagtgaagatttcctgcaagacatctggatacaccttcaccagctactatatggtctgggtgcgacaggcccctggacaaggacttgagtggatgggcataatcaaacctagtggtggtaacacaatctatgcacagaagttccagggcagagtcaccatgaccagggacacgtccacgaacacagtctacatggacctgagtagtctgagatctgaggacacggccgtgtattattgtgcgagaactggggatagggcttttgatgtctggggccaagggacaatggtcaccgtctcttca

SEQ ID NO: 1415 - protein, 117 aa, Homo sapiens
QMQLVQSGAEVKKPGASVKISCKTSGYTFTSYYMVWVRQAPGQGLEWMGIIKPSGGNTIYAQKFQGRVTMTRDTSTNTVYMDLSSLRSEDTAVYYCARTGDRAFDVWGQGTMVTVSS

SEQ ID NO: 1416 - protein, 8 aa, Homo sapiens
GYTFTSYY

SEQ ID NO: 1417 - protein, 8 aa, Homo sapiens
IKPSGGNT

SEQ ID NO: 1418 - protein, 10 aa, Homo sapiens
ARTGDRAFDV

SEQ ID NO: 1419 - DNA, 330 bp, Homo sapiens
cagtctgtgttgacgcagccgccctcagtgtctgcggccccaggacagaaggtcaccatctcctgctctggaagtacctccaacattgggagtaattatgtctcctggtaccagcagctcccaggaacagcccccaaactcctcatttatgacaatagtaagcgcccctcagggattcctgaccgattctctggctccaagtctggcacgtcagccaccctgggcatcaccggactccagactggggacgaggccgattattactgcggaacatgggatagcagcctgggtgctggggtgttcggcggagggaccaaactgaccgtccta

SEQ ID NO: 1420 - protein, 110 aa, Homo sapiens
QSVLTQPPSVSAAPGQKVTISCSGSTSNIGSNYVSWYQQLPGTAPKLLIYDNSKRPSGIPDRFSGSKSGTSATLGITGLQTGDEADYYCGTWDSSLGAGVFGGGTKLTVL

SEQ ID NO: 1421 - protein, 8 aa, Homo sapiens
TSNIGSNY

SEQ ID NO: 1422 - skipped

SEQ ID NO: 1423 - protein, 11 aa, Homo sapiens
GTWDSSLGAGV

SEQ ID NO: 1424 - DNA, 351 bp, Homo sapiens
cagatacagctggtgcagtctggggctgaggtgaagaagcctggggcctcagtgaagttttcctgcaagacatctggatacaccttcaccaactactatatggtctgggtgcgacaggcccctggacaaggacttgagtggatgggcataatcaaacctagtggtggtaacacaatctacgcacagaacttccagggcagagtcaccatgaccagggacacgtccacgaacacagtctacatggacctgaggagtctgagatctgaggacacggccgtgtattattgtgcgagaactggtgatagggcttttgatgtctggggccaagggacaatggtcaccgtctcttca

SEQ ID NO: 1425 - protein, 117 aa, Homo sapiens; identical to SEQ ID NO: 1405

SEQ ID NO: 1426 - protein, 8 aa, Homo sapiens
GYTFTNYY

SEQ ID NO: 1427 - protein, 8 aa, Homo sapiens
IKPSGGNT

SEQ ID NO: 1428 - protein, 10 aa, Homo sapiens
ARTGDRAFDV

SEQ ID NO: 1429 - DNA, 330 bp, Homo sapiens
cagtctgtgttgacgcagccgccctcagtgtctgcggccccaggacagaaggtcaccatctcctgctctggaagcagctccaacattgggaataattttgtatcctggtaccagcagttcccaggaacagcccccaaactcctcatttatgacaataataagcgaccctcagggattcctgaccgattctctggctccaagtctggcacgtcagccaccctgggcatcaccggactccagactggggacgaggccgattattactgcggaacatgggatagcagtttgggtgctggggtgttcggcggagggaccaaactgaccgtccta

SEQ ID NO: 1430 - protein, 110 aa, Homo sapiens; identical to SEQ ID NO: 1240

SEQ ID NO: 1431 - protein, 8 aa, Homo sapiens
SSNIGNNF

SEQ ID NO: 1432 - skipped

SEQ ID NO: 1433 - protein, 11 aa, Homo sapiens
GTWDSSLGAGV

SEQ ID NO: 1434 - DNA, 351 bp, Homo sapiens
cagattcagttagtgcagtctggggctgaggtgaagaagcctggggcctcagtgaagctttcctgcaagacatctggatacaccttcaccagctactatatggtctgggtgcgacaggcccctggacaaggacttgagtggatgggcataatcaaacctagtggtggtaacacaatctacgcacagaagttccagggcagagtcaccatgaccagggacacgtccacgaacacagtctacatggacctgaacagtctgagatctgaggacacggccgtctattattgtgcgagaactggagatagggcttttgatgtctggggccacgggacaatggtcaccgtgtcttca

SEQ ID NO: 1435 - protein, 117 aa, Homo sapiens
QIQLVQSGAEVKKPGASVKLSCKTSGYTFTSYYMVWVRQAPGQGLEWMGIIKPSGGNTIYAQKFQGRVTMTRDTSTNTVYMDLNSLRSEDTAVYYCARTGDRAFDVWGHGTMVTVSS

SEQ ID NO: 1436 - protein, 8 aa, Homo sapiens
GYTFTSYY

SEQ ID NO: 1437 - protein, 8 aa, Homo sapiens
IKPSGGNT

SEQ ID NO: 1438 - protein, 10 aa, Homo sapiens
ARTGDRAFDV

SEQ ID NO: 1439 - DNA, 330 bp, Homo sapiens
cagtctgtgttgacgcagccgccctcagtgtctgcggccccaggacagaaggtcaccatctcctgctctggaagcagctccaatattgggaataattatgtatcctggtaccagcagttcccaggaacagcccccaaactcttcatttatgacaataataagcgaccctcagggatttctgaccgattctctggctccaagtctggcacgtcagccaccctgggcatcaccggactccagactggggacgaggccgattattactgcggaacatgggatagcagcctgggtgctggggtgttcggcggagggaccaagctgaccgtccta

SEQ ID NO: 1440 - protein, 110 aa, Homo sapiens
QSVLTQPPSVSAAPGQKVTISCSGSSSNIGNNYVSWYQQFPGTAPKLFIYDNNKRPSGISDRFSGSKSGTSATLGITGLQTGDEADYYCGTWDSSLGAGVFGGGTKLTVL

SEQ ID NO: 1441 - protein, 8 aa, Homo sapiens
SSNIGNNY

SEQ ID NO: 1442 - skipped

SEQ ID NO: 1443 - protein, 11 aa, Homo sapiens
GTWDSSLGAGV

SEQ ID NO: 1444 - DNA, 351 bp, Homo sapiens
cagatacagctggtacagtctggggctgaggtgaagaagcctggggcctcagtgaagttttcctgcaagacatctggatacaccttcaccaccaactatatggtctgggtgcgacaggcccctggacaaggacttgagtggatgggcataatcaaacctagtggtggtgacacaatctacgcacagcaattccagggcagagtcaccatgaccagggacacgtccacgaacacagtctacatggacctgaccagtctgacatctgaggacacggccgtctattattgtgcgagaactggggatagggcttttgatgtctggggccaagggacaatggtcaccgtctcgtca

SEQ ID NO: 1445 - protein, 117 aa, Homo sapiens
QIQLVQSGAEVKKPGASVKFSCKTSGYTFTTNYMVWVRQAPGQGLEWMGIIKPSGGDTIYAQQFQGRVTMTRDTSTNTVYMDLTSLTSEDTAVYYCARTGDRAFDVWGQGTMVTVSS

SEQ ID NO: 1446 - protein, 8 aa, Homo sapiens
GYTFTTNY

SEQ ID NO: 1447 - protein, 8 aa, Homo sapiens
IKPSGGDT

SEQ ID NO: 1448 - protein, 10 aa, Homo sapiens
ARTGDRAFDV

SEQ ID NO: 1449 - DNA, 330 bp, Homo sapiens
cagtctgtgttgacgcagccgccctcagtgtctgcggccccaggacagaaggtcaccatctcctgctctggaagcagctccaacattgggaataattatgtatcctggtaccagcagctcccaggaacagcccccaaactcctcatttatgacgatggaaagcgaccctcagggattcctgatcgattctctggctccaagtctggcacgtcagcctccctgggcatcaccggactccagactggggacgaggccgattattactgcggaacatgggataccagcctgggttctggggtgttcggcggcgggaccaagttgaccgtccta

SEQ ID NO: 1450 - protein, 110 aa, Homo sapiens
QSVLTQPPSVSAAPGQKVTISCSGSSSNIGNNYVSWYQQLPGTAPKLLIYDDGKRPSGIPDRFSGSKSGTSASLGITGLQTGDEADYYCGTWDTSLGSGVFGGGTKLTVL

SEQ ID NO: 1451 - protein, 8 aa, Homo sapiens
SSNIGNNY

SEQ ID NO: 1452 - skipped

SEQ ID NO: 1453 - protein, 11 aa, Homo sapiens
GTWDTSLGSGV

SEQ ID NO: 1454 - DNA, 351 bp, Homo sapiens
cagatacaactggtgcagtctggggctgaggtgaagaagcctggggcctcagtgaagttttcctgcaagacatctggatacaccttcaccaactactatatggtctgggtgcgacaggcccctggacaaggacttgagtggatgggcataatcaaacctagtggtggtgacacaatctacgcacagaacttccagggcagagtcaccatgaccagggacacgtccacgaacacagtctatatggacctgaggagtctgagatctgaagacacggccgtgtattattgtgcgagaactggtgatagggcttttgatgtctggggccaagggacaatggtcaccgtctcttca

SEQ ID NO: 1455 - protein, 117 aa, Homo sapiens
QIQLVQSGAEVKKPGASVKFSCKTSGYTFTNYYMVWVRQAPGQGLEWMGIIKPSGGDTIYAQNFQGRVTMTRDTSTNTVYMDLRSLRSEDTAVYYCARTGDRAFDVWGQGTMVTVSS

SEQ ID NO: 1456 - protein, 8 aa, Homo sapiens
GYTFTNYY

SEQ ID NO: 1457 - protein, 8 aa, Homo sapiens
IKPSGGDT

SEQ ID NO: 1458 - protein, 10 aa, Homo sapiens
ARTGDRAFDV

SEQ ID NO: 1459 - DNA, 330 bp, Homo sapiens; identical to SEQ ID NO: 1299

SEQ ID NO: 1460 - protein, 110 aa, Homo sapiens; identical to SEQ ID NO: 1240

SEQ ID NO: 1461 - protein, 8 aa, Homo sapiens
SSNIGNNF

SEQ ID NO: 1462 - skipped

SEQ ID NO: 1463 - protein, 11 aa, Homo sapiens
GTWDSSLGAGV

SEQ ID NO: 1464 - DNA, 351 bp, Homo sapiens
cagatgcaattggtgcaatctggggctgaggtgaagaagcctggggcctcagtgaagatttcctgcaagacatctggatacaccttcaccaactactatatggtctgggtgcgacaggcccctggacaaggacttgagtggatgggcataatcaaacctagtggtggtaacacgatctacgcacagaagttccaggacagagtcaccatgaccagggacacgtccacgaacacagtctatttggacctgagcagtctgagatctgaggacacggccgtctattattgtgcgagaactggggatagggcttttgatgtctggggccacgggacaatggtcaccgtctcttca

SEQ ID NO: 1465 - protein, 117 aa, Homo sapiens
QMQLVQSGAEVKKPGASVKISCKTSGYTFTNYYMVWVRQAPGQGLEWMGIIKPSGGNTIYAQKFQDRVTMTRDTSTNTVYLDLSSLRSEDTAVYYCARTGDRAFDVWGHGTMVTVSS

SEQ ID NO: 1466 - protein, 8 aa, Homo sapiens
GYTFTNYY

SEQ ID NO: 1467 - protein, 8 aa, Homo sapiens
IKPSGGNT

SEQ ID NO: 1468 - protein, 10 aa, Homo sapiens
ARTGDRAFDV

SEQ ID NO: 1469 - DNA, 330 bp, Homo sapiens
cagtctgtgttgacgcagccgccctcagtgtctgcggccccaggacagaaggtcaccatctcctgctctggaagcagctccaacattgggaataattttgtttcctggtaccagcagttcccaggaacagcccccaaactcctcatttatgtcaataataagcgaccctcagggattcctgaccgattctctggctccaggtctggcacgtcagccaccctgggcatcaccggactccagactggggacgaggccgattattactgcggaacatgggatagcagcctgggtgctggggtgttcggcggagggaccaaactgaccgtccta

SEQ ID NO: 1470 - protein, 110 aa, Homo sapiens
QSVLTQPPSVSAAPGQKVTISCSGSSSNIGNNFVSWYQQFPGTAPKLLIYVNNKRPSGIPDRFSGSRSGTSATLGITGLQTGDEADYYCGTWDSSLGAGVFGGGTKLTVL

SEQ ID NO: 1471 - protein, 8 aa, Homo sapiens
SSNIGNNF

SEQ ID NO: 1472 - skipped

SEQ ID NO: 1473 - protein, 11 aa, Homo sapiens
GTWDSSLGAGV

SEQ ID NO: 1474 - DNA, 351 bp, Homo sapiens
cagatgcagttggtgcagtctggggctgaggtgaggaagcctggggcctcagtgaagatttcctgcaagacatctggatacaccttcatcaactactatatggtctgggtgcgacaggcccctggacaaggacttgagtggatgggcataatcaaacctagtggtggttatacgatctacgcacagaagttccagggcagagtcaccatgaccagggacacgtccacgtacacagtctatatggccctgagcggtctgagatctgaggacacggccgtgtattattgtgcgagaactggggatagggcttttgatgtctggggccacgggacaatggtcaccgtctcttca

SEQ ID NO: 1475 - protein, 117 aa, Homo sapiens
QMQLVQSGAEVRKPGASVKISCKTSGYTFINYYMVWVRQAPGQGLEWMGIIKPSGGYTIYAQKFQGRVTMTRDTSTYTVYMALSGLRSEDTAVYYCARTGDRAFDVWGHGTMVTVSS

SEQ ID NO: 1476 - protein, 8 aa, Homo sapiens
GYTFINYY

SEQ ID NO: 1477 - protein, 8 aa, Homo sapiens
IKPSGGYT

SEQ ID NO: 1478 - protein, 10 aa, Homo sapiens
ARTGDRAFDV

SEQ ID NO: 1479 - DNA, 330 bp, Homo sapiens
cagtctgtattgacgcagccgccctcagtgtctgcggccccaggacagaaggtcaccatctcctgctctggaagcagctccaacattgggaataattatgtttcctggtaccagcagttcccaggaacagcccccaaactcctcatttatgacaatcataagcgaccctcaggtattcctgaccgattctctgcctccaagtctggcacgtcagccaccctgggcatcaccggactcctgactggggacgaggccgattattactgcggaacatgggatagcggcctgggtgctggggtgttcggcggagggaccaagctgaccgtccta

SEQ ID NO: 1480 - protein, 110 aa, Homo sapiens; identical to SEQ ID NO: 1310

SEQ ID NO: 1481 - protein, 8 aa, Homo sapiens
SSNIGNNY

SEQ ID NO: 1482 - skipped

SEQ ID NO: 1483 - protein, 11 aa, Homo sapiens
GTWDSGLGAGV

SEQ ID NO: 1484 - DNA, 351 bp, Homo sapiens
cagattcaattggtgcagtctggggctgaggtgaagaagcctggggcctccgtgaagatttcgtgcaagccatctggatacaccttcaccaactactatatggtctgggtgcgacaggcccctggacaaggacttgagtggatgggcataatcaaacctagtggtggtaacacgatctacgcacagaagttccagggcagagtcaccatgaccagggacacgtccacgaacacagtctatttggacctgagcagtctgagatctgaggacacggccgtatattattgtgcgagaactggggatagggcttttgatgtctggggccacgggacaatggtcaccgtctcttca

SEQ ID NO: 1485 - protein, 117 aa, Homo sapiens
QIQLVQSGAEVKKPGASVKISCKPSGYTFTNYYMVWVRQAPGQGLEWMGIIKPSGGNTIYAQKFQGRVTMTRDTSTNTVYLDLSSLRSEDTAVYYCARTGDRAFDVWGHGTMVTVSS

SEQ ID NO: 1486 - protein, 8 aa, Homo sapiens
GYTFTNYY

SEQ ID NO: 1487 - protein, 8 aa, Homo sapiens
IKPSGGNT

SEQ ID NO: 1488 - protein, 10 aa, Homo sapiens
ARTGDRAFDV

SEQ ID NO: 1489 - DNA, 330 bp, Homo sapiens
cagtctgtgttgacgcagacgccctcagtgtctgcggccccaggacagaaggtcaccatctcctgctctggaagcagctccaatattgggaataattatgtttcctggtaccagcagttcccaggaacagtccccaaactcctcatttatgacaataataagcgaccctcagggattcctgaccgattctctggctccaagtctggcacgtcagccaccctgggcatcaccggactccagactggggacgaggccgaatattactgcggaacatgggatagcagcctgggtgctggggtgttcggcggagggaccaagctgaccgtccta

SEQ ID NO: 1490 - protein, 110 aa, Homo sapiens
QSVLTQTPSVSAAPGQKVTISCSGSSSNIGNNYVSWYQQFPGTVPKLLIYDNNKRPSGIPDRFSGSKSGTSATLGITGLQTGDEAEYYCGTWDSSLGAGVFGGGTKLTVL

SEQ ID NO: 1491 - protein, 8 aa, Homo sapiens
SSNIGNNY

SEQ ID NO: 1492 - skipped

SEQ ID NO: 1493 - protein, 11 aa, Homo sapiens
GTWDSSLGAGV

SEQ ID NO: 1494 - DNA, 351 bp, Homo sapiens
cagattcagttggtgcagtctggggctgaggtgaagaagcctggggcctcagtgaagttttcctgcaagacatctggatacaccttcaccagctactatatggtctgggtgcgacaggcccctggacaaggacttgagtggatgggcattatcaaacctagtggtggtaacacaatctacgcacagaagttccagggcagagtcaccatgaccagggacacgtccacgaacacagtctacatggacctgagcagtctgagatctgaggacacggccgtttattattgtgcgagaactggggatagggcttttgatgtctggggccacgggacaatgatcaccgtctcttca

SEQ ID NO: 1495 - protein, 117 aa, Homo sapiens; identical to SEQ ID NO: 1235

SEQ ID NO: 1496 - protein, 8 aa, Homo sapiens
GYTFTSYY

SEQ ID NO: 1497 - protein, 8 aa, Homo sapiens
IKPSGGNT

SEQ ID NO: 1498 - protein, 10 aa, Homo sapiens
ARTGDRAFDV

SEQ ID NO: 1499 - DNA, 330 bp, Homo sapiens; identical to SEQ ID NO: 1239

SEQ ID NO: 1500 - protein, 110 aa, Homo sapiens; identical to SEQ ID NO: 1240

SEQ ID NO: 1501 - protein, 8 aa, Homo sapiens
SSNIGNNF

SEQ ID NO: 1502 - skipped

SEQ ID NO: 1503 - protein, 11 aa, Homo sapiens
GTWDSSLGAGV

SEQ ID NO: 1504 - DNA, 351 bp, Homo sapiens
cagatacagctggtgcagtctggggctgaggtgaagaagcctggggcctcagtgaagttttcctgcaagacatctggatacaccttcaccaactactatatggtctgggtgcgacaggcccctggacaaggacttgagtggatgggcataatcaaacctagtggtggtaacacaatctacgcacagaatttccagggcagagtcaccatgaccagggacacgtccacgaacacagtctacatggacctgaggagtctgagatctgaggacacggccgtgtattattgtgcgagaactggtgatagggcttttgatgtctggggccaagggacaatggtcaccgtctctgca

SEQ ID NO: 1505 - protein, 117 aa, Homo sapiens
QIQLVQSGAEVKKPGASVKFSCKTSGYTFTNYYMVWVRQAPGQGLEWMGIIKPSGGNTIYAQNFQGRVTMTRDTSTNTVYMDLRSLRSEDTAVYYCARTGDRAFDVWGQGTMVTVSA

SEQ ID NO: 1506 - protein, 8 aa, Homo sapiens
GYTFTNYY

SEQ ID NO: 1507 - protein, 8 aa, Homo sapiens
IKPSGGNT

SEQ ID NO: 1508 - protein, 10 aa, Homo sapiens
ARTGDRAFDV

SEQ ID NO: 1509 - DNA, 330 bp, Homo sapiens; identical to SEQ ID NO: 1299

SEQ ID NO: 1510 - protein, 110 aa, Homo sapiens; identical to SEQ ID NO: 1240

SEQ ID NO: 1511 - protein, 8 aa, Homo sapiens
SSNIGNNF

SEQ ID NO: 1512 - skipped

SEQ ID NO: 1513 - protein, 11 aa, Homo sapiens
GTWDSSLGAGV

SEQ ID NO: 1514 - DNA, 351 bp, Homo sapiens
cagatgcaactggtgcagtctggggctgaggtgaagaagcctggggcctcagtgaagatttcctgcaagacatctggataccccttcaccaactactatatggtctgggtgcgacaggcccctggacaaggacttgagtggatgggcataatcaaacctagtggtggtaacacgatctatgcacagaagttccagggcagagtcaccatgaccagggacacgtccaccaacacagtctatttggacctgagcagtctgagatctgaggacacggccgtgtatttttgtgcgagaactggggatagggcttttgatgtctggggccacgggacaatagtcaccgtctcttca

SEQ ID NO: 1515 - protein, 117 aa, Homo sapiens
QMQLVQSGAEVKKPGASVKISCKTSGYPFTNYYMVWVRQAPGQGLEWMGIIKPSGGNTIYAQKFQGRVTMTRDTSTNTVYLDLSSLRSEDTAVYFCARTGDRAFDVWGHGTIVTVSS

SEQ ID NO: 1516 - protein, 8 aa, Homo sapiens
GYPFTNYY

SEQ ID NO: 1517 - protein, 8 aa, Homo sapiens
IKPSGGNT

SEQ ID NO: 1518 - protein, 10 aa, Homo sapiens
ARTGDRAFDV

SEQ ID NO: 1519 - DNA, 330 bp, Homo sapiens
cagtctgtgttgacgcagccgccctcagtgtctgcggccccaggacagaaggtcaccatctcctgctctggaagcagctccaacattgggaataattatgtttcctggtaccagcagttcccaggaacagcccccaaactcctcatttatgacaataataagcgaccctcagggattcctgaccgattctctggctccaagtctggcacgtcagccaccctgggcatcaccggactccagactggggacgaggccgattattactgcggaacatgggatagcagcctgggtgctggggtgttcggcggagggaccaagctgaccgtccta

SEQ ID NO: 1520 - protein, 110 aa, Homo sapiens; identical to SEQ ID NO: 1290

SEQ ID NO: 1521 - protein, 8 aa, Homo sapiens
SSNIGNNY

SEQ ID NO: 1522 - skipped

SEQ ID NO: 1523 - protein, 11 aa, Homo sapiens
GTWDSSLGAGV

SEQ ID NO: 1524 - DNA, 351 bp, Homo sapiens
cagatgcaattggtgcagtctgggactgaggtgaagaagcctggggcctcagtgaagatttcctgcaagacatctggatacaccttcaccaactactatatggtctgggtgcgacaggcccctggacaaggacttgagtggatgggcataatcaaacctagtggtggtaacacgatctacgcacagaagttccagggcagagtcaccatgaccagggacacgtccacgaacacagtctatttggacctgagcagtctgagatctgaggacacggccatgtattattgtgcgagaactggtgatagggcttttgatgtctggggccacgggacagtggtcaccgtctcttca

SEQ ID NO: 1525 - protein, 117 aa, Homo sapiens
QMQLVQSGTEVKKPGASVKISCKTSGYTFTNYYMVWVRQAPGQGLEWMGIIKPSGGNTIYAQKFQGRVTMTRDTSTNTVYLDLSSLRSEDTAMYYCARTGDRAFDVWGHGTVVTVSS

SEQ ID NO: 1526 - protein, 8 aa, Homo sapiens
GYTFTNYY

SEQ ID NO: 1527 - protein, 8 aa, Homo sapiens
IKPSGGNT

SEQ ID NO: 1528 - protein, 10 aa, Homo sapiens
ARTGDRAFDV

SEQ ID NO: 1529 - DNA, 330 bp, Homo sapiens
cagtctgtgctgacgcagccgccctcagtgtttgcggccccaggacagaaggtcaccatctcctgctctggaagcagctccaacattgggaataattatgtttcctggtaccaacagttcccaggaacagcccccaaactcctcatctatgacaataataagcgaccctcagggattcctgaccgattctctggctccaagtctggcacgtcagccaccctgggcatcaccggactccagactggggacgaggccgattattactgcggaacatgggatagcagcctgggtgctggggtgttcggcggagggaccaagctgaccgtccta

SEQ ID NO: 1530 - protein, 110 aa, Homo sapiens
QSVLTQPPSVFAAPGQKVTISCSGSSSNIGNNYVSWYQQFPGTAPKLLIYDNNKRPSGIPDRFSGSKSGTSATLGITGLQTGDEADYYCGTWDSSLGAGVFGGGTKLTVL

SEQ ID NO: 1531 - protein, 8 aa, Homo sapiens
SSNIGNNY

SEQ ID NO: 1532 - skipped

SEQ ID NO: 1533 - protein, 11 aa, Homo sapiens
GTWDSSLGAGV

SEQ ID NO: 1534 - DNA, 351 bp, Homo sapiens
cagatacagctggtgcagtctggggctgaggtgaagaagcctggggcctcagtgaagctttcctgcaagacatctggatacaccttcaccaactactatatggtctgggtgcgacaggcccctggacaaggacttgagtggatgggcataatcaaacctactggtggtaacacaatctacgcacagaatttccagggcagagtcaccatgtccagggacacgtccacgaacacagtctacatggacctgaggagtctgagatctgaggacgcggccgtgtattattgtgcgagaactggtgatagggcttttgatgtctggggccaagggacaatggtcaccgtctcttca

SEQ ID NO: 1535 - protein, 117 aa, Homo sapiens
QIQLVQSGAEVKKPGASVKLSCKTSGYTFTNYYMVWVRQAPGQGLEWMGIIKPTGGNTIYAQNFQGRVTMSRDTSTNTVYMDLRSLRSEDAAVYYCARTGDRAFDVWGQGTMVTVSS

SEQ ID NO: 1536 - protein, 8 aa, Homo sapiens
GYTFTNYY

SEQ ID NO: 1537 - protein, 8 aa, Homo sapiens
IKPTGGNT

SEQ ID NO: 1538 - protein, 10 aa, Homo sapiens
ARTGDRAFDV

SEQ ID NO: 1539 - DNA, 330 bp, Homo sapiens
cagtctgtgttgacgcagccgccctcagtgtctgcgaccccaggacagaaggtcaccatctcctgctctggaagcagctccaacattgggaataattttgtatcctggtaccagcagttcccaggaacagcccccaaactcctcatttatgacaataataagcgaccctcagggattcctgaccgattctctggctccaagtctggcacgtcagccaccctgggcatcaccggactccagactggggacgaggccgattattactgcggaacatgggatagcggcctgggtgctggggtgttcggcggagggaccaagctgaccgtccta

SEQ ID NO: 1540 - protein, 110 aa, Homo sapiens
QSVLTQPPSVSATPGQKVTISCSGSSSNIGNNFVSWYQQFPGTAPKLLIYDNNKRPSGIPDRFSGSKSGTSATLGITGLQTGDEADYYCGTWDSGLGAGVFGGGTKLTVL

SEQ ID NO: 1541 - protein, 8 aa, Homo sapiens
SSNIGNNF

SEQ ID NO: 1542 - skipped

SEQ ID NO: 1543 - protein, 11 aa, Homo sapiens
GTWDSGLGAGV

SEQ ID NO: 1544 - DNA, 351 bp, Homo sapiens
cagatacaactggtgcagtctggggctgaggtgaagaagcctggggcctcagtgaagttttcctgcaagacatctggatacaccttcaccaactactatttggtctgggtgcgacaggcccctggacaaggacttgagtggatgggcataatcaaacctactggtggtaacacaatctacgcacagaacttccagggcagagtcaccatgaccagggacacgtccacgaacacagtctacatggacctgaggagtctgagatctgaggacacggccgtgtattattgtgcgagaactggtggtagggcttttgatgtctggggccaagggacaatggtcaccgtctcttca

SEQ ID NO: 1545 - protein, 117 aa, Homo sapiens
QIQLVQSGAEVKKPGASVKFSCKTSGYTFTNYYLVWVRQAPGQGLEWMGIIKPTGGNTIYAQNFQGRVTMTRDTSTNTVYMDLRSLRSEDTAVYYCARTGGRAFDVWGQGTMVTVSS

SEQ ID NO: 1546 - protein, 8 aa, Homo sapiens
GYTFTNYY

SEQ ID NO: 1547 - protein, 8 aa, Homo sapiens
IKPTGGNT

SEQ ID NO: 1548 - protein, 10 aa, Homo sapiens
ARTGGRAFDV

SEQ ID NO: 1549 - DNA, 330 bp, Homo sapiens
cagtctgtgttgacgcagccgccctcagtgtctgcggccccaggacagaaggtcaccatctcctgctctggaaacagctccaatattggggataattttgtgtcctggtaccaacagttcccaggaacagcccccaaactcctcatttatgacaataataagcgaccctcagggattcctgaccgattctctggctccaagtctggcacgtcagccaccctgggcatcaccggactccagactggggacgaggccgattattactgcggaacatgggatagcagcctgggtgctggggtgttcggcggagggaccaggctgaccgtccta

SEQ ID NO: 1550 - protein, 110 aa, Homo sapiens
QSVLTQPPSVSAAPGQKVTISCSGNSSNIGDNFVSWYQQFPGTAPKLLIYDNNKRPSGIPDRFSGSKSGTSATLGITGLQTGDEADYYCGTWDSSLGAGVFGGGTRLTVL

SEQ ID NO: 1551 - protein, 8 aa, Homo sapiens
SSNIGDNF

SEQ ID NO: 1552 - skipped

SEQ ID NO: 1553 - protein, 11 aa, Homo sapiens
GTWDSSLGAGV

SEQ ID NO: 1554 - DNA, 351 bp, Homo sapiens
cagattcagttggtgcagtctggggctgaggtgaagaagcctggggcctcagtgaagttttcttgcaagacatctggatacaccttcaccaactactatatggtctgggtgcgacaggcccctggacaaggacttgagtggatgggcataatcaaacctagtggtggtaacacaatctacgcacagaagttccagggcagagtcaccatgaccagggacacgtccacggacacagtctacatggacctgaacagtctgagatctgaggacacggccgtctattattgtgcgagaactggagatagggcttttgatgtctggggccacgggacaatggtcaccgtgtcttca

SEQ ID NO: 1555 - protein, 117 aa, Homo sapiens
QIQLVQSGAEVKKPGASVKFSCKTSGYTFTNYYMVWVRQAPGQGLEWMGIIKPSGGNTIYAQKFQGRVTMTRDTSTDTVYMDLNSLRSEDTAVYYCARTGDRAFDVWGHGTMVTVSS

SEQ ID NO: 1556 - protein, 8 aa, Homo sapiens
GYTFTNYY

SEQ ID NO: 1557 - protein, 8 aa, Homo sapiens
IKPSGGNT

SEQ ID NO: 1558 - protein, 10 aa, Homo sapiens
ARTGDRAFDV

SEQ ID NO: 1559 - DNA, 330 bp, Homo sapiens
cagtctgtgttgacgcagccgccctcagtgtctgcggccccaggacagaaggtcaccatctcctgctctggaagcagctccaacattgggaataattatgtatcctggtaccagcagttcccaggaacagcccccaaactcctcatttatgacaataataagcgaccctcagggattcttgaccgattctctggctccaagtctggcacgtcagccaccctgggcatcaccggactccagactggggacgaggccgattattattgcggaacatgggatagcagcctgggtgctggggtgttcggcggagggaccaaactgaccgtccta

SEQ ID NO: 1560 - protein, 110 aa, Homo sapiens
QSVLTQPPSVSAAPGQKVTISCSGSSSNIGNNYVSWYQQFPGTAPKLLIYDNNKRPSGILDRFSGSKSGTSATLGITGLQTGDEADYYCGTWDSSLGAGVFGGGTKLTVL

SEQ ID NO: 1561 - protein, 8 aa, Homo sapiens
SSNIGNNY

SEQ ID NO: 1562 - skipped

SEQ ID NO: 1563 - protein, 11 aa, Homo sapiens
GTWDSSLGAGV

SEQ ID NO: 1564 - DNA, 351 bp, Homo sapiens
cagctgcaattggtgcagtctggggctgaggtgaagaagcctggggcctcagtgaagatttcctgcaagacatctggatacaccttcaccaactactatatggtctgggtgcgacaggcccttggacaaggacttgagtggatgggcataatcaaacctagtggtggttacacgagctacgcacagaagttccagggcagagtcaccatgaccagggacacgtccacgaacacagtctatttggacctgagtagtctgagatctgaggacacggccgtgtattattgtgcgagaactggtgatagggcatttgatgtctggggccacgggacagtggtcaccgtctcttca

SEQ ID NO: 1565 - protein, 117 aa, Homo sapiens
QLQLVQSGAEVKKPGASVKISCKTSGYTFTNYYMVWVRQALGQGLEWMGIIKPSGGYTSYAQKFQGRVTMTRDTSTNTVYLDLSSLRSEDTAVYYCARTGDRAFDVWGHGTVVTVSS

SEQ ID NO: 1566 - protein, 8 aa, Homo sapiens
GYTFTNYY

SEQ ID NO: 1567 - protein, 8 aa, Homo sapiens
IKPSGGYT

SEQ ID NO: 1568 - protein, 10 aa, Homo sapiens
ARTGDRAFDV

SEQ ID NO: 1569 - DNA, 330 bp, Homo sapiens
cagtctgtgttgacgcagccgccctcagtgtctgcggccccaggacagaaggtcaccctctcctgctctggaagcagctccaacattgggaataattatgtttcctggtaccagcagttcccaggaacagcccccaaactcctcatctatgacaataataagcgaccctcagggattcctgaccgattctctggctccaagtctggcacgtcagccaccctgggcatcaccggactccagactggggacgaggccgattattactgcggaacatgggatagcagcctgggtgctggggtgttcggcggagggaccaagctgaccgtccta

SEQ ID NO: 1570 - protein, 110 aa, Homo sapiens
QSVLTQPPSVSAAPGQKVTLSCSGSSSNIGNNYVSWYQQFPGTAPKLLIYDNNKRPSGIPDRFSGSKSGTSATLGITGLQTGDEADYYCGTWDSSLGAGVFGGGTKLTVL

SEQ ID NO: 1571 - protein, 8 aa, Homo sapiens
SSNIGNNY

SEQ ID NO: 1572 - skipped

SEQ ID NO: 1573 - protein, 11 aa, Homo sapiens
GTWDSSLGAGV

SEQ ID NO: 1574 - DNA, 351 bp, Homo sapiens
cagatgcaattggtgcagtctggggctgaggtgaagaagcctggggcctcagtgaagatttcctgcaagacatctggatacatattcaccaactattatatggtctgggtgcgacaggcccctggacaaggacttgagtggatgggcataatcaaacctagcggtggtaacacgatctacgcacagaagttccagggcagagtcaccatgaccagggacacgtccacgaacacagtctatttggacctgagcagtctgagatatgaggacacggccgtctattattgtgcgagaactggtgatagggcttttgatgtctggggccacgggacagtggtcaccgtctcttca

SEQ ID NO: 1575 - protein, 117 aa, Homo sapiens
QMQLVQSGAEVKKPGASVKISCKTSGYIFTNYYMVWVRQAPGQGLEWMGIIKPSGGNTIYAQKFQGRVTMTRDTSTNTVYLDLSSLRYEDTAVYYCARTGDRAFDVWGHGTVVTVSS

SEQ ID NO: 1576 - protein, 8 aa, Homo sapiens
GYIFTNYY

SEQ ID NO: 1577 - protein, 8 aa, Homo sapiens
IKPSGGNT

SEQ ID NO: 1578 - protein, 10 aa, Homo sapiens
ARTGDRAFDV

SEQ ID NO: 1579 - DNA, 330 bp, Homo sapiens
cagtctgtgttgacgcagccgccctcagtgtctgcggccccaggacagaaggtcaccatctcctgctctggaagcagctccaacattgggaataattatgtttcctggtaccagcagttcccaggaacagcccccaaactcctcatctatgacaataataagcgaccctcagggattcctgaccgattctctggctccaagtctggcacgtcagccaccctgggcatcaccggactccagactggggacgaggccgattattactgcggaacatgggatagcagcctgggtgctggggtgttcggcggagggaccaagctgaccgtccta

SEQ ID NO: 1580 - protein, 110 aa, Homo sapiens; identical to SEQ ID NO: 1290

SEQ ID NO: 1581 - protein, 8 aa, Homo sapiens
SSNIGNNY

SEQ ID NO: 1582 - skipped

SEQ ID NO: 1583 - protein, 11 aa, Homo sapiens
GTWDSSLGAGV

SEQ ID NO: 1584 - DNA, 351 bp, Homo sapiens
cagatgcagttggtgcagtctggggctgaggtgaagaagcctggggcctcagtgaagatttcctgcaagacatctggatacaccttcatcaactactatatggtctgggtgcgacaggcccctggacaaggacttgagtggatgggcataatcaaacctagtggtggtaacacgatctacgcacagaagttccagggcagagtcaccatgaccagggacacgtccacgaacacagtctatatggacctgagcagtctgagatctgaggacacggccgtgtattattgtgcgagaactggggatagggcttttgatgtctggggccacgggacaatggtcaccgtctcttca

SEQ ID NO: 1585 - protein, 117 aa, Homo sapiens
QMQLVQSGAEVKKPGASVKISCKTSGYTFINYYMVWVRQAPGQGLEWMGIIKPSGGNTIYAQKFQGRVTMTRDTSTNTVYMDLSSLRSEDTAVYYCARTGDRAFDVWGHGTMVTVSS

SEQ ID NO: 1586 - protein, 8 aa, Homo sapiens
GYTFINYY

SEQ ID NO: 1587 - protein, 8 aa, Homo sapiens
IKPSGGNT

SEQ ID NO: 1588 - protein, 10 aa, Homo sapiens
ARTGDRAFDV

SEQ ID NO: 1589 - DNA, 330 bp, Homo sapiens
cagtctgtgttgacgcagccgccctcagtgtctgcggccccaggacagaaggtcaccatctcctgctctggaagcagctccaacattgggaataattttgtttcctggtaccagcagttcccaggaacagcccccaaactcctcatttatgacaatcataagcgaccctcagggattcctgaccgattctctgcctccaagtctggcacgtcagccaccctgggcatcaccggactccagactggggacgaggccgattattactgcggaacatgggatagcggcctgggtgctggggtgttcggcggagggaccaagctgaccgtccta

SEQ ID NO: 1590 - protein, 110 aa, Homo sapiens
QSVLTQPPSVSAAPGQKVTISCSGSSSNIGNNFVSWYQQFPGTAPKLLIYDNHKRPSGIPDRFSASKSGTSATLGITGLQTGDEADYYCGTWDSGLGAGVFGGGTKLTVL

SEQ ID NO: 1591 - protein, 8 aa, Homo sapiens
SSNIGNNF

SEQ ID NO: 1592 - skipped

SEQ ID NO: 1593 - protein, 11 aa, Homo sapiens
GTWDSGLGAGV

SEQ ID NO: 1594 - DNA, 351 bp, Homo sapiens
cagattcaattggtgcagtctggggctgaggtgaagaagcctggggcctcagtgaagatttcctgcaagacatctggatatatcttcaccaactactatatggtctgggtgcgacaggcccctggacaaggacttgagtggatgggcataatcaaacctagtggtggtaacacgatctacgcacagaagttccagggcagagtcaccatgaccagggacacgtccacgaccacagtctatttggacctgaacagtctgagatctgaggacacggccgtgtattattgtgcgagaactggtgatagggcttttgatgtctggggccacgggacagtggtcaccgtctcttca

SEQ ID NO: 1595 - protein, 117 aa, Homo sapiens
QIQLVQSGAEVKKPGASVKISCKTSGYIFTNYYMVWVRQAPGQGLEWMGIIKPSGGNTIYAQKFQGRVTMTRDTSTTTVYLDLNSLRSEDTAVYYCARTGDRAFDVWGHGTVVTVSS

SEQ ID NO: 1596 - protein, 8 aa, Homo sapiens
GYIFTNYY

SEQ ID NO: 1597 - protein, 8 aa, Homo sapiens
IKPSGGNT

SEQ ID NO: 1598 - protein, 10 aa, Homo sapiens
ARTGDRAFDV

SEQ ID NO: 1599 - DNA, 330 bp, Homo sapiens
cagtctgtgttgacgcagccgccctcagtgtctgcggccccaggacagaaggtcaccatctcctgctctggaagcagctccaacattgggaataattatgtttcctggtaccagcaattcccaggaacagcccccaaactcctcatctatgacaataataagcgaccctcagggattcctgaccgattctctggctccaagtctggcacgtcagccaccctgggcatcaccggactccagactggggacgaggccgattattactgcggaacatgggatagcagcctgggtgctggggtgttcggcggagggaccaagctgaccgtcctg

SEQ ID NO: 1600 - protein, 110 aa, Homo sapiens; identical to SEQ ID NO: 1290

SEQ ID NO: 1601 - protein, 8 aa, Homo sapiens
SSNIGNNY

SEQ ID NO: 1602 - skipped

SEQ ID NO: 1603 - protein, 11 aa, Homo sapiens
GTWDSSLGAGV

SEQ ID NO: 1604 - DNA, 351 bp, Homo sapiens
cagatgcagctggtgcagtctggggctgaggtgaagaagcctggggcctcagtgaagatttcctgcaagacatctggatacaccttcaccagttactatatggtctgggtgcgacaggcccctggacaaggacttgaatggatgggcataatcaaacctagtggtggtaacacaatctacgcacagaaattccagggcagagtcaccatgaccagggacacgtccacgaatacagtcttcatggacctgaggagtctgagatctgaggacacggccgtgtattattgtgcgagaactggggatagggcttttgatgtctggggccaagggacagtggtcaccgtctcttca

SEQ ID NO: 1605 - protein, 117 aa, Homo sapiens
QMQLVQSGAEVKKPGASVKISCKTSGYTFTSYYMVWVRQAPGQGLEWMGIIKPSGGNTIYAQKFQGRVTMTRDTSTNTVFMDLRSLRSEDTAVYYCARTGDRAFDVWGQGTVVTVSS

SEQ ID NO: 1606 - protein, 8 aa, Homo sapiens
GYTFTSYY

SEQ ID NO: 1607 - protein, 8 aa, Homo sapiens
IKPSGGNT

SEQ ID NO: 1608 - protein, 10 aa, Homo sapiens
ARTGDRAFDV

SEQ ID NO: 1609 - DNA, 330 bp, Homo sapiens
cagtctgtgttgacgcagccgccctcagtgtctgcggccccaggacagaaggtcaccatctcctgctctggaagcagctccaacattgggaataattttgtatcctggtacctgcagttcccaggaacagcccccaaactcctcatttttgacaataataagcgaccctcagggattcctgaccgattctctggctccaagtctggcacgtcagccaccctgggcatctccggactccagactggggacgaggccgattattactgcggaacatgggatagcagcctgggtgctggggtgttcggcggagggacccaactgaccgtccta

SEQ ID NO: 1610 - protein, 110 aa, Homo sapiens
QSVLTQPPSVSAAPGQKVTISCSGSSSNIGNNFVSWYLQFPGTAPKLLIFDNNKRPSGIPDRFSGSKSGTSATLGISGLQTGDEADYYCGTWDSSLGAGVFGGGTQLTVL

SEQ ID NO: 1611 - protein, 8 aa, Homo sapiens
SSNIGNNF

SEQ ID NO: 1612 - skipped

SEQ ID NO: 1613 - protein, 11 aa, Homo sapiens
GTWDSSLGAGV

SEQ ID NO: 1614 - DNA, 351 bp, Homo sapiens
cagatgcagttggtgcagtctggggctgaggtgaagaagcctggggcctcagtgaagatttcctgcaagacatctggatacaccttcaccaattactatatggtctgggtgcgacaggcccctggacaaggacttgagtggatgggcataatcaaacctagtggtggtaacacgatctacgcacagaagttccagggcagagtcaccatgaccagggacacgtccacgaacacagtctatatggacctgagcagtctgagatctgaggacacggccgtgtattattgtgcgagaactggggatagggcttttgatgtctggggccacgggacaatggtcaccgtctcttca

SEQ ID NO: 1615 - protein, 117 aa, Homo sapiens
QMQLVQSGAEVKKPGASVKISCKTSGYTFTNYYMVWVRQAPGQGLEWMGIIKPSGGNTIYAQKFQGRVTMTRDTSTNTVYMDLSSLRSEDTAVYYCARTGDRAFDVWGHGTMVTVSS

SEQ ID NO: 1616 - protein, 8 aa, Homo sapiens
GYTFTNYY

SEQ ID NO: 1617 - protein, 8 aa, Homo sapiens
IKPSGGNT

SEQ ID NO: 1618 - protein, 10 aa, Homo sapiens
ARTGDRAFDV

SEQ ID NO: 1619 - DNA, 330 bp, Homo sapiens
cagtctgtgttgacgcagccgccctcagtgtctgcggccccaggacagaaggtcaccatctcctgctctggaagcagctccaacattgggaataattatctttcctggtaccagcagttcccaggaacagcccccaaactcctcatttatgacaataataaacgaccctcagggattcctgaccgattctctggctccaagtctggcacgtcagccaccctgggcatcaccggactccagactggggacgaggccgattattactgcggaacatgggatagcagcctgggtgctggggtgttcggcggagggaccaaggtgaccgtccta

SEQ ID NO: 1620 - protein, 110 aa, Homo sapiens
QSVLTQPPSVSAAPGQKVTISCSGSSSNIGNNYLSWYQQFPGTAPKLLIYDNNKRPSGIPDRFSGSKSGTSATLGITGLQTGDEADYYCGTWDSSLGAGVFGGGTKVTVL

SEQ ID NO: 1621 - protein, 8 aa, Homo sapiens
SSNIGNNY

SEQ ID NO: 1622 - skipped

SEQ ID NO: 1623 - protein, 11 aa, Homo sapiens
GTWDSSLGAGV

SEQ ID NO: 1624 - DNA, 351 bp, Homo sapiens
cagatgcaattggtgcagtctggggctgaggtgaagaagcctgggacctcagtgaagatttcctgcaagacatctggatacaccttcaccaactactatatggtctgggtgcgacaggcccctggacaaggacttgagtggatgggcataatcaaacctagtggtggtaacacgatctacgcacagaagttccagggcagagtcaccatgaccagggacacgtccacgaacacagtctatttggacctgagcagtctgagatctgaggacacggccgtgtattattgtgcgagaactggggatagggcttttgatgtctggggccacgggacaatggtcaccgtctcttca

SEQ ID NO: 1625 - protein, 117 aa, Homo sapiens
QMQLVQSGAEVKKPGTSVKISCKTSGYTFTNYYMVWVRQAPGQGLEWMGIIKPSGGNTIYAQKFQGRVTMTRDTSTNTVYLDLSSLRSEDTAVYYCARTGDRAFDVWGHGTMVTVSS

SEQ ID NO: 1626 - protein, 8 aa, Homo sapiens
GYTFTNYY

SEQ ID NO: 1627 - protein, 8 aa, Homo sapiens
IKPSGGNT

SEQ ID NO: 1628 - protein, 10 aa, Homo sapiens
ARTGDRAFDV

SEQ ID NO: 1629 - DNA, 330 bp, Homo sapiens
cagtctgtgttgacgcagccgccctcagtgtctgcggccccaggacagaaggtcaccatctcctgctctggaagcagctccaacattgggaataattatgtttcctggtaccagcagttcccaggaacagcccccaaactcctcatttatgacaataataagcgaccctcagggattcctgaccgattctctggctccaagtctggcacgtcagccaccctgggcatcaccggactccagactggggacgaggccgattattactgcggaacatgggatagcagcctgggtgctggggtgttcggcggagggaccacgctgaccgtccta

SEQ ID NO: 1630 - protein, 110 aa, Homo sapiens
QSVLTQPPSVSAAPGQKVTISCSGSSSNIGNNYVSWYQQFPGTAPKLLIYDNNKRPSGIPDRFSGSKSGTSATLGITGLQTGDEADYYCGTWDSSLGAGVFGGGTTLTVL

SEQ ID NO: 1631 - protein, 8 aa, Homo sapiens
SSNIGNNY

SEQ ID NO: 1632 - skipped

SEQ ID NO: 1633 - protein, 11 aa, Homo sapiens
GTWDSSLGAGV

SEQ ID NO: 1634 - DNA, 351 bp, Homo sapiens
cagattcagttggtgcagtctggggctgaggtgaagaagcctggggcctcagtgaagttttcctgtaagacatctggatacaccttcaccagctactatatggtctgggtgcgacaggcccctggacaaggacttgagtggatgggcataatcaaacctagtggtggtaacacaatctacgcacagaagttccagggcagagtcaccatgaccagggacacgtccacaaacacagtctacatggacctgaacagtctgagatctgaggacacggccgtctattattgtgcgagaactggagatagggcttttgatgtctggggccacgggacaatggtcaccgtgtcttca

SEQ ID NO: 1635 - protein, 117 aa, Homo sapiens
QIQLVQSGAEVKKPGASVKFSCKTSGYTFTSYYMVWVRQAPGQGLEWMGIIKPSGGNTIYAQKFQGRVTMTRDTSTNTVYMDLNSLRSEDTAVYYCARTGDRAFDVWGHGTMVTVSS

SEQ ID NO: 1636 - protein, 8 aa, Homo sapiens
GYTFTSYY

SEQ ID NO: 1637 - protein, 8 aa, Homo sapiens
IKPSGGNT

SEQ ID NO: 1638 - protein, 10 aa, Homo sapiens
ARTGDRAFDV

SEQ ID NO: 1639 - DNA, 330 bp, Homo sapiens
cagtctgtgttgacgcagccgccctcagtgtctgcggccccaggacagaaggtccccatctcctgccctggaagcagctccaacattgggaataattatgtatcctggtaccaccagttcccagggacaacccccaaactcctcatttatgacaataataagcgaccctcagggattcctgaccgattctccggctccaagtctggcacggcagccaccctgggcatcaccggactccagactggggacgaggccgattattactgcggaacatgggatagcagcctgggtgctggggtgttcggcggagggaccaaactgaccgtccta

SEQ ID NO: 1640 - protein, 110 aa, Homo sapiens
QSVLTQPPSVSAAPGQKVPISCPGSSSNIGNNYVSWYHQFPGTTPKLLIYDNNKRPSGIPDRFSGSKSGTAATLGITGLQTGDEADYYCGTWDSSLGAGVFGGGTKLTVL

SEQ ID NO: 1641 - protein, 8 aa, Homo sapiens
SSNIGNNY

SEQ ID NO: 1642 - skipped

SEQ ID NO: 1643 - protein, 11 aa, Homo sapiens
GTWDSSLGAGV

SEQ ID NO: 1644 - DNA, 351 bp, Homo sapiens
cagatgcagttggtgcagtctggggctgaggtgaagaagcctggggcctcagtgaagatttcctgcaagacatctggatacaccttcaccaactactatatggtctgggtgcgacaggccccgggacaaggacttgagtggatgggcataatcaaacctagtggcggtgacacgatctacgcacagaagttccagggcagagtcaccatgaccagggacacgtccacgaacacagtctatatggacctgagcagtctgagatctgaggacacggccgtgtattattgtgcgagaactgggaatagggcttttgatgtctggggccacgggacaatggtcaccgtctcttca

SEQ ID NO: 1645 - protein, 117 aa, Homo sapiens
QMQLVQSGAEVKKPGASVKISCKTSGYTFTNYYMVWVRQAPGQGLEWMGIIKPSGGDTIYAQKFQGRVTMTRDTSTNTVYMDLSSLRSEDTAVYYCARTGNRAFDVWGHGTMVTVSS

SEQ ID NO: 1646 - protein, 8 aa, Homo sapiens
GYTFTNYY

SEQ ID NO: 1647 - protein, 8 aa, Homo sapiens
IKPSGGDT

SEQ ID NO: 1648 - protein, 10 aa, Homo sapiens
ARTGNRAFDV

SEQ ID NO: 1649 - DNA, 330 bp, Homo sapiens; identical to SEQ ID NO: 1519

SEQ ID NO: 1650 - protein, 110 aa, Homo sapiens; identical to SEQ ID NO: 1290

SEQ ID NO: 1651 - protein, 8 aa, Homo sapiens
SSNIGNNY

SEQ ID NO: 1652 - skipped

SEQ ID NO: 1653 - protein, 11 aa, Homo sapiens
GTWDSSLGAGV

SEQ ID NO: 1654 - DNA, 351 bp, Homo sapiens
cagatgcagttggtgcagtctggggctgaggtgaagaagcctggggcctcagtgaagatttcctgcaagacatctggatacaccttcaccgactactatatggtctgggtgcgacaggcccctggacaaggacttgagtggatgggcatgatcaaacccagtggtggtaacacgatctacgcacagaagttccagggcagagtcaccatgaccagggacacgtccacgaacacagtctatatggacctgagcagtctgaggtctgaggacacggccgtgtattattgcacaagaactgggaatagggcttttgatgtctggggccacgggacaatggtcaccgtctcttca

SEQ ID NO: 1655 - protein, 117 aa, Homo sapiens
QMQLVQSGAEVKKPGASVKISCKTSGYTFTDYYMVWVRQAPGQGLEWMGMIKPSGGNTIYAQKFQGRVTMTRDTSTNTVYMDLSSLRSEDTAVYYCTRTGNRAFDVWGHGTMVTVSS

SEQ ID NO: 1656 - protein, 8 aa, Homo sapiens
GYTFTDYY

SEQ ID NO: 1657 - protein, 8 aa, Homo sapiens
IKPSGGNT

SEQ ID NO: 1658 - protein, 10 aa, Homo sapiens
TRTGNRAFDV

SEQ ID NO: 1659 - DNA, 330 bp, Homo sapiens
cagtctgtgttgacgcagccgccctcagtgtctgcggccccaggacagaaggtcaccatctcctgctctggaagcagctccaacattgcgaataattatgtttcctggtaccagcagttcccaggaacagcccccaaactcctcatttttgacaataataagcgaccctcagggattcctgaccgattctctggctccaagtctggcacgtcagccaccctgggcatcaccggactccagactggggacgaggccgattattactgcggaacatgggatagcagcctgggtgctggggtgttcggcggagggaccaagctgaccgtccta

SEQ ID NO: 1660 - protein, 110 aa, Homo sapiens
QSVLTQPPSVSAAPGQKVTISCSGSSSNIANNYVSWYQQFPGTAPKLLIFDNNKRPSGIPDRFSGSKSGTSATLGITGLQTGDEADYYCGTWDSSLGAGVFGGGTKLTVL

SEQ ID NO: 1661 - protein, 8 aa, Homo sapiens
SSNIANNY

SEQ ID NO: 1662 - skipped

SEQ ID NO: 1663 - protein, 11 aa, Homo sapiens
GTWDSSLGAGV

SEQ ID NO: 1664 - DNA, 351 bp, Homo sapiens
cagatgcaattggtgcaatctggggctgaggtgaagaagcctggggcctcagtgaagatttcctgcaagacatctggatacaccttcaccaactactatatggtctgggtgcgacaggcccctggccaaggacttgagtggatgggcataatcaaacctagtggtggtaacacgatctacgcacagaagttccaggacagagtcaccatgaccagggacacgtccacgaacacagtctatttggacctgagcagtctgagatctgaggacacggccgtctattattgtgcgagaactggggatagggcttttgatgtctggggccacgggacaatggtcaccgtctcttca

SEQ ID NO: 1665 - protein, 117 aa, Homo sapiens; identical to SEQ ID NO: 1465

SEQ ID NO: 1666 - protein, 8 aa, Homo sapiens
GYTFTNYY

SEQ ID NO: 1667 - protein, 8 aa, Homo sapiens
IKPSGGNT

SEQ ID NO: 1668 - protein, 10 aa, Homo sapiens
ARTGDRAFDV

SEQ ID NO: 1669 - DNA, 330 bp, Homo sapiens
cagtctgtgttgacgcagccgccctcagtgtctgcggccccaggacagaaggtcaccatctcctgctctggaagcagctccaacattgggaataattttgtttcctggtaccagcagttcccaggaacagcccccaaactcctcatttatgtcaataataagcgaccctcagggattcctgaccgattctctggctccaggtctggcacgtcagccaccctgggcatcaccggactccagactggggacgaggccgattattactgcggaacatgggatagcagcctgggtgctggggtgttcggcggagggaccaagctgaccgtccta

SEQ ID NO: 1670 - protein, 110 aa, Homo sapiens; identical to SEQ ID NO: 1470

SEQ ID NO: 1671 - protein, 8 aa, Homo sapiens
SSNIGNNF

SEQ ID NO: 1672 - skipped

SEQ ID NO: 1673 - protein, 11 aa, Homo sapiens
GTWDSSLGAGV

SEQ ID NO: 1674 - DNA, 351 bp, Homo sapiens
cagatgcaattggtgcaatctggggctgaggtgaagaagcctggggcctcagtgaagatttcctgcaagacatctggatacaccttcaccaagtactatatggtctgggtgcgacaggcccctggacaaggacttgagtggatgggcataatcaaacctagtggtggtaacacgatctacgcacagaagttccagggcagagtcaccatgaccagggacacgtccacgaacacagtctatttggacctgagcagtctgagatctgaggacacggccgtctattattgtgccagaactggggatagggcttttgatgtctggggccacgggacaatggtcaccgtctcttca

SEQ ID NO: 1675 - protein, 117 aa, Homo sapiens
QMQLVQSGAEVKKPGASVKISCKTSGYTFTKYYMVWVRQAPGQGLEWMGIIKPSGGNTIYAQKFQGRVTMTRDTSTNTVYLDLSSLRSEDTAVYYCARTGDRAFDVWGHGTMVTVSS

SEQ ID NO: 1676 - protein, 8 aa, Homo sapiens
GYTFTKYY

SEQ ID NO: 1677 - protein, 8 aa, Homo sapiens
IKPSGGNT

SEQ ID NO: 1678 - protein, 10 aa, Homo sapiens
ARTGDRAFDV

SEQ ID NO: 1679 - DNA, 330 bp, Homo sapiens
cagtctgtattgacgcagccgccctcagtgtctgcggccccaggacagaaggtcaccatctcctgctctggaagcaactccaacattgggaataattttgtttcctggtaccagcagttcccaggaacagcccccaaactcctcatttatgacaataataaacgaccctcagggattcctgaccgattctctggctccaagtctggcacgtcagccaccctgggcatcaccggactccagactggggacgaggccgattattactgcggaacatgggatagcagcctgggtgctggggtgttcggcggagggaccaagctgaccgtccta

SEQ ID NO: 1680 - protein, 110 aa, Homo sapiens
QSVLTQPPSVSAAPGQKVTISCSGSNSNIGNNFVSWYQQFPGTAPKLLIYDNNKRPSGIPDRFSGSKSGTSATLGITGLQTGDEADYYCGTWDSSLGAGVFGGGTKLTVL

SEQ ID NO: 1681 - protein, 8 aa, Homo sapiens
NSNIGNNF

SEQ ID NO: 1682 - skipped

SEQ ID NO: 1683 - protein, 11 aa, Homo sapiens
GTWDSSLGAGV

SEQ ID NO: 1684 - DNA, 351 bp, Homo sapiens
cagatacagctggtgcagtctggggctgaggtgaagaagcctgggtcctcagtgaagttttcctgcaagacatctggatacaccttcaccaactactatatggtctgggtgcgacaggcccctggacaaggacttgagtggatgggcataatcaaacctagtggtggtaacacaatctacgcacagaatttccagggcagagtcaccatgaccagggacacgtccacgaacacagtctacatggacctgaggagtctgagatctgaggacacggccgtctattattgtgcgagaactggtgatagggcttttgatgtctggggccaagggacaatggtcaccgtctcttca

SEQ ID NO: 1685 - protein, 117 aa, Homo sapiens
QIQLVQSGAEVKKPGSSVKFSCKTSGYTFTNYYMVWVRQAPGQGLEWMGIIKPSGGNTIYAQNFQGRVTMTRDTSTNTVYMDLRSLRSEDTAVYYCARTGDRAFDVWGQGTMVTVSS

SEQ ID NO: 1686 - protein, 8 aa, Homo sapiens
GYTFTNYY

SEQ ID NO: 1687 - protein, 8 aa, Homo sapiens
IKPSGGNT

SEQ ID NO: 1688 - protein, 10 aa, Homo sapiens
ARTGDRAFDV

SEQ ID NO: 1689 - DNA, 330 bp, Homo sapiens
cagtctgtgttgacgcagccgccctcagtgtctgcgaccccaggacagaaggtcaccatctcctgctctggaagcagctccaacattgggaataattttgtatcctggtaccagcagttcccaggaacagccccccaactcctcatttatgacaataataagcgaccctcagggattcctgaccgattctctggctcccagtctggcacgtcagccaccctgggcatcaccggactccagactggggacgaggccgattattactgcggaacatgggatagcagcctgggtgctggggtgttcggcggagggaccaagctgaccgtccta

SEQ ID NO: 1690 - protein, 110 aa, Homo sapiens
QSVLTQPPSVSATPGQKVTISCSGSSSNIGNNFVSWYQQFPGTAPQLLIYDNNKRPSGIPDRFSGSQSGTSATLGITGLQTGDEADYYCGTWDSSLGAGVFGGGTKLTVL

SEQ ID NO: 1691 - protein, 8 aa, Homo sapiens
SSNIGNNF

SEQ ID NO: 1692 - skipped

SEQ ID NO: 1693 - protein, 11 aa, Homo sapiens
GTWDSSLGAGV

SEQ ID NO: 1694 - DNA, 351 bp, Homo sapiens
cagattcagttggtgcagtctggggctgaggtgaagaagcctggggcctcagtgaaattttcctgcaagacatctggatacaccttcaccagctactatatggtctgggtgcgacaggcccctggacaaggacttgagtggatgggcataatcaaacctagtggtggtaacacaatctacgcacagaagttccagggcagagtcaccatgaccagggacacgtccacgaacacagtcttcatggacctgaacagtctgagatctgaggacacggccgtctattattgtgcgagaactggagatagggcttttgatgtctggggccacgggacaatggtcaccgtgtcttca

SEQ ID NO: 1695 - protein, 117 aa, Homo sapiens
QIQLVQSGAEVKKPGASVKFSCKTSGYTFTSYYMVWVRQAPGQGLEWMGIIKPSGGNTIYAQKFQGRVTMTRDTSTNTVFMDLNSLRSEDTAVYYCARTGDRAFDVWGHGTMVTVSS

SEQ ID NO: 1696 - protein, 8 aa, Homo sapiens
GYTFTSYY

SEQ ID NO: 1697 - protein, 8 aa, Homo sapiens
IKPSGGNT

SEQ ID NO: 1698 - protein, 10 aa, Homo sapiens
ARTGDRAFDV

SEQ ID NO: 1699 - DNA, 330 bp, Homo sapiens
cagtctgtgttgacgcagccgccctcagtgtctgcggccccaggacagaaggtcaccatctcctgctctggaagcagttccaacattgggaataattatgtatcctggtaccagcagttcccaggaacagcccccaaactcctcatttatgacaataataagcgaccctcagggattcctgaccgattctctggctccaagtctggcacgtcagccaccctgggcatcaccggactccagactggggacgaggccgattattactgcggaacatgggatagcagcctgggtgctggggtgttcggcggagggaccaaactgaccgtccta

SEQ ID NO: 1700 - protein, 110 aa, Homo sapiens; identical to SEQ ID NO: 1290

SEQ ID NO: 1701 - protein, 8 aa, Homo sapiens
SSNIGNNY

SEQ ID NO: 1702 - skipped

SEQ ID NO: 1703 - protein, 11 aa, Homo sapiens
GTWDSSLGAGV

SEQ ID NO: 1704 - DNA, 351 bp, Homo sapiens; identical to SEQ ID NO: 1424

SEQ ID NO: 1705 - protein, 117 aa, Homo sapiens; identical to SEQ ID NO: 1405

SEQ ID NO: 1706 - protein, 8 aa, Homo sapiens
GYTFTNYY

SEQ ID NO: 1707 - protein, 8 aa, Homo sapiens
IKPSGGNT

SEQ ID NO: 1708 - protein, 10 aa, Homo sapiens
ARTGDRAFDV

SEQ ID NO: 1709 - DNA, 330 bp, Homo sapiens
cagtctgtgttgacgcagtcgccctcagtgtctgcggccccaggacagaaggtcaccatctcctgctctggaagcagctccaacattgggaataattttgtatcctggtaccagcagttcccaggaacagcccccaaactcctcatttatgacaataataagcgaccctcagggattcctgaccgattctctggctccaagtctggcacgtcagccaccctgggcatcaccggactccagactggggacgaggccgattattactgcggaacatgggatagcagcctgggtgctggggtgttcggcggagggaccaagctgaccgtccta

SEQ ID NO: 1710 - protein, 110 aa, Homo sapiens
QSVLTQSPSVSAAPGQKVTISCSGSSSNIGNNFVSWYQQFPGTAPKLLIYDNNKRPSGIPDRFSGSKSGTSATLGITGLQTGDEADYYCGTWDSSLGAGVFGGGTKLTVL

SEQ ID NO: 1711 - protein, 8 aa, Homo sapiens
SSNIGNNF

SEQ ID NO: 1712 - skipped

SEQ ID NO: 1713 - protein, 11 aa, Homo sapiens
GTWDSSLGAGV

SEQ ID NO: 1714 - DNA, 351 bp, Homo sapiens
cagatgcaattggtgcagtctggggctgaggtgaagaagcctggggcctcactgaggatttcctgcaagacatctggatacaccttcaccaactactatatggtctgggtgcgacaggcccctggacaaggacttgagtggatgggcataatcaaacctagtggtggtaacacgatctacgcacagaagttccagggcagagtcaccttgaccagggacacgtccacgaacacagtctatttggacctgaacagtctgagatctgaggacacggccatgtattattgtgcgagaactggggatagggcctttgatgtctggggccacgggacaatggtcaccgtctcttca

SEQ ID NO: 1715 - protein, 117 aa, Homo sapiens
QMQLVQSGAEVKKPGASLRISCKTSGYTFTNYYMVWVRQAPGQGLEWMGIIKPSGGNTIYAQKFQGRVTLTRDTSTNTVYLDLNSLRSEDTAMYYCARTGDRAFDVWGHGTMVTVSS

SEQ ID NO: 1716 - protein, 8 aa, Homo sapiens
GYTFTNYY

SEQ ID NO: 1717 - protein, 8 aa, Homo sapiens
IKPSGGNT

SEQ ID NO: 1718 - protein, 10 aa, Homo sapiens
ARTGDRAFDV

SEQ ID NO: 1719 - DNA, 330 bp, Homo sapiens
cagtctgtgttgacgcagccgccctcagtgtctgcggccccaggacagaaggtcaccatctcctgctctggaagcagctccaacattgggaataattatgtttcctggtaccaacagttcccaggaacagcccccaaactcctcatttatgacaataataagcgaccctcagggattcctgaccgagtctctggctccaagtctggcacgtcagccaccctgggcatcaccggactccagactggggacgaggccgattattactgcggaacatgggatagcagcctgggtgctggggtgttcggcggagggaccaagctgaccgtccta

SEQ ID NO: 1720 - protein, 110 aa, Homo sapiens
QSVLTQPPSVSAAPGQKVTISCSGSSSNIGNNYVSWYQQFPGTAPKLLIYDNNKRPSGIPDRVSGSKSGTSATLGITGLQTGDEADYYCGTWDSSLGAGVFGGGTKLTVL

SEQ ID NO: 1721 - protein, 8 aa, Homo sapiens
SSNIGNNY

SEQ ID NO: 1722 - skipped

SEQ ID NO: 1723 - protein, 11 aa, Homo sapiens
GTWDSSLGAGV

SEQ ID NO: 1724 - DNA, 351 bp, Homo sapiens
cagatgcagttggtgcagtctggggctgaggtgaagaagcctggggcctcagtgaaattttcctgcaagacatctggatacaccttcaccaactactatatggtctgggtgcgacaggcccctggacaaggacttgagtggatgggcataatcaaacctagtggtggtaacacaatctacgcacagaagttccagggcagagtcaccatgaccagggacacgtccacgaacacagtctacatggacctgaacagtctgacatctgaggacacggccgtatattattgtgcgagaactgggaatagggcttttgatgtctggggccacgggacaatggtcaccgtctcttca

SEQ ID NO: 1725 - protein, 117 aa, Homo sapiens
QMQLVQSGAEVKKPGASVKFSCKTSGYTFTNYYMVWVRQAPGQGLEWMGIIKPSGGNTIYAQKFQGRVTMTRDTSTNTVYMDLNSLTSEDTAVYYCARTGNRAFDVWGHGTMVTVSS

SEQ ID NO: 1726 - protein, 8 aa, Homo sapiens
GYTFTNYY

SEQ ID NO: 1727 - protein, 8 aa, Homo sapiens
IKPSGGNT

SEQ ID NO: 1728 - protein, 10 aa, Homo sapiens
ARTGNRAFDV

SEQ ID NO: 1729 - DNA, 330 bp, Homo sapiens
cagtctgtgttgacgcagccgccctcagtgtctgcggccccaggacagaaggtcaccatctcctgctctggaagcagctccaatattgggaataattttgtttcctggtaccagcagtttccaggaacagcccccaaactcctcatttatgacaattctaagcgaccctcagggattcctgaccgattctctggctccaagtctggcacgtcagccaccctgggcatcaccggactccagactggggacgaggccgattattactgcggaacatgggatagcagcctgggtgctggggtgttcggcggagggaccaaactgaccgtccta

SEQ ID NO: 1730 - protein, 110 aa, Homo sapiens
QSVLTQPPSVSAAPGQKVTISCSGSSSNIGNNFVSWYQQFPGTAPKLLIYDNSKRPSGIPDRFSGSKSGTSATLGITGLQTGDEADYYCGTWDSSLGAGVFGGGTKLTVL

SEQ ID NO: 1731 - protein, 8 aa, Homo sapiens
SSNIGNNF

SEQ ID NO: 1732 - skipped

SEQ ID NO: 1733 - protein, 11 aa, Homo sapiens
GTWDSSLGAGV

SEQ ID NO: 1734 - DNA, 351 bp, Homo sapiens
cagatgcaattggtgcaatctggggctgaggtgaagaagcctggggcctcagtgaagatttcctgcaagacatctggatacaccttcaccaactactatatggtctgggtgcgacaggcccctggacaaggacttgagtggatgggcataatcaaacctagtggtggtaacacgatctacacacagaagttccagggcagagtcaccatgaccagggacacgtccacgaacacagtctatttggacctgagcagtctgagatctgacgacacggccgtctattattgtgcgagaactggggatagggcttttgatgtctggggccacgggacaatggtcaccgtctcttca

SEQ ID NO: 1735 - protein, 117 aa, Homo sapiens
QMQLVQSGAEVKKPGASVKISCKTSGYTFTNYYMVWVRQAPGQGLEWMGIIKPSGGNTIYTQKFQGRVTMTRDTSTNTVYLDLSSLRSDDTAVYYCARTGDRAFDVWGHGTMVTVSS

SEQ ID NO: 1736 - protein, 8 aa, Homo sapiens
GYTFTNYY

SEQ ID NO: 1737 - protein, 8 aa, Homo sapiens
IKPSGGNT

SEQ ID NO: 1738 - protein, 10 aa, Homo sapiens
ARTGDRAFDV

SEQ ID NO: 1739 - DNA, 330 bp, Homo sapiens
cagtctgtgttgacgcagccgccctcagtgtctgcggccccaggacagaaggtcaccatctcctgctctggaagcagctccaacattgggaataattttgtttcctggtaccagcagttcccaggaacagcccccaaactcctcatttatgacaataataagcgaccctcagggattcctgaccgattctctggctccaagtctggcacgtcagccaccctgggcatcaccggactccagactggggacgaggccgattattactgcggaacatgggatagcagcctgggtactggggtgttcggcggagggaccaagctgaccgtccta

SEQ ID NO: 1740 - protein, 110 aa, Homo sapiens
QSVLTQPPSVSAAPGQKVTISCSGSSSNIGNNFVSWYQQFPGTAPKLLIYDNNKRPSGIPDRFSGSKSGTSATLGITGLQTGDEADYYCGTWDSSLGTGVFGGGTKLTVL

SEQ ID NO: 1741 - protein, 8 aa, Homo sapiens
SSNIGNNF

SEQ ID NO: 1742 - skipped

SEQ ID NO: 1743 - protein, 11 aa, Homo sapiens
GTWDSSLGTGV

SEQ ID NO: 1744 - DNA, 351 bp, Homo sapiens
cagatacagttggtgcagtctggggctgaggtgaagaagcctggggcctcagtgaagctttcctgcaagacatctggatacaccttcaccagctactatatggtctgggtgcgacaggcccctggacaaggacttgagtggatgggcataatcaaacctagtggtggtaacacaatctacgcacagcagttccagggcagagccaccatgaccagggacacgtccacgaacacagtctacatggacctgagcagtctgagatctgaggacacggccgtttattattgtgcgagaactggggatagggcttttgatgtctggggccacgggacactggtcaccgtctcttca

SEQ ID NO: 1745 - protein, 117 aa, Homo sapiens
QIQLVQSGAEVKKPGASVKLSCKTSGYTFTSYYMVWVRQAPGQGLEWMGIIKPSGGNTIYAQQFQGRATMTRDTSTNTVYMDLSSLRSEDTAVYYCARTGDRAFDVWGHGTLVTVSS

SEQ ID NO: 1746 - protein, 8 aa, Homo sapiens
GYTFTSYY

SEQ ID NO: 1747 - protein, 8 aa, Homo sapiens
IKPSGGNT

SEQ ID NO: 1748 - protein, 10 aa, Homo sapiens
ARTGDRAFDV

SEQ ID NO: 1749 - DNA, 330 bp, Homo sapiens
cagtctgtgttgacgcagccgccctcagtgtctgcggccccaggacagaagatcaccatctcctgctctggaagcagctccaacattggaaataattttgtatcctggtaccagcagttcccaggaacagcccccaaactcctcatttatgacaataataagcgaccctcagggactcctgaccgattctctggctccaagtctggcgcgtcagccaccctgggcatcaccggactccagactggggacgaggccgattattactgcggaacatgggatagcagcctgggtgctggggtgttcggcggagggaccaagctgaccgtcctg

SEQ ID NO: 1750 - protein, 110 aa, Homo sapiens
QSVLTQPPSVSAAPGQKITISCSGSSSNIGNNFVSWYQQFPGTAPKLLIYDNNKRPSGTPDRFSGSKSGASATLGITGLQTGDEADYYCGTWDSSLGAGVFGGGTKLTVL

SEQ ID NO: 1751 - protein, 8 aa, Homo sapiens
SSNIGNNF

SEQ ID NO: 1752 - skipped

SEQ ID NO: 1753 - protein, 11 aa, Homo sapiens
GTWDSSLGAGV

SEQ ID NO: 1754 - DNA, 351 bp, Homo sapiens
cagatacagttggtgcagtctggggctgaggtgaaggagcctggggcctcagtgaagttttcctgcaagacatctggatacaccttcaccagctactatatggtctgggtgcgacaggcccctggacaaggacttgagtggatgggcataatcaaatctagtggtggtgacacaatctacgcacagaagttccagggccgagtcaccatgaccagggacacgtccacgcacacagtctacatggacctgaacagtctgacatatgaagacacggccgtatattattgtgcgagaagtgggaatagggcttttgatgtctggggccatgggacaatggtcaccgtctcttca

SEQ ID NO: 1755 - protein, 117 aa, Homo sapiens
QIQLVQSGAEVKEPGASVKFSCKTSGYTFTSYYMVWVRQAPGQGLEWMGIIKSSGGDTIYAQKFQGRVTMTRDTSTHTVYMDLNSLTYEDTAVYYCARSGNRAFDVWGHGTMVTVSS

SEQ ID NO: 1756 - protein, 8 aa, Homo sapiens
GYTFTSYY

SEQ ID NO: 1757 - protein, 8 aa, Homo sapiens
IKSSGGDT

SEQ ID NO: 1758 - protein, 10 aa, Homo sapiens
ARSGNRAFDV

SEQ ID NO: 1759 - DNA, 330 bp, Homo sapiens
cagtctgtgttgacgcagccgccctcagtgtctgcggccccaggacagaaggtcaccatctcctgctctggaagcagctccaacattgggaataattttgtatcctggtaccaacagttcccaggaacagcccccaaactcctcatttatgacaatactaagcgaccctcagggattcctgaccgattctctggctccaagtctggcacgtcagccaccctgggcatcaccggactccagactggggacgaggccgattattactgcggaacatgggatagcagcctgggtgctggggtgttcggcggagggaccaagctgaccgtccta

SEQ ID NO: 1760 - protein, 110 aa, Homo sapiens
QSVLTQPPSVSAAPGQKVTISCSGSSSNIGNNFVSWYQQFPGTAPKLLIYDNTKRPSGIPDRFSGSKSGTSATLGITGLQTGDEADYYCGTWDSSLGAGVFGGGTKLTVL

SEQ ID NO: 1761 - protein, 8 aa, Homo sapiens
SSNIGNNF

SEQ ID NO: 1762 - skipped

SEQ ID NO: 1763 - protein, 11 aa, Homo sapiens
GTWDSSLGAGV

SEQ ID NO: 1764 - DNA, 351 bp, Homo sapiens
cagatgcaattggtgcagtctggggctgaggtgaagaagcctggggcctcagtgaagatttcctgcaagacatctggatacaccttcaccaactactatatggtctgggtgcgacaggcccctggacaaggacttgagtggatgggcataatcaaacctagtggcggtaacacgatctacgcacagaagttccagggcagagtcaccatgacccgggacacgtccacgaacacagtctatttggacctgagcagtctgagatctgaggatacggccgtgtattattgtgcgagaactggggatagggcttttgatgtctggggccacgggacaatggtcaccgtctcttca

SEQ ID NO: 1765 - protein, 117 aa, Homo sapiens
QMQLVQSGAEVKKPGASVKISCKTSGYTFTNYYMVWVRQAPGQGLEWMGIIKPSGGNTIYAQKFQGRVTMTRDTSTNTVYLDLSSLRSEDTAVYYCARTGDRAFDVWGHGTMVTVSS

SEQ ID NO: 1766 - protein, 8 aa, Homo sapiens
GYTFTNYY

SEQ ID NO: 1767 - protein, 8 aa, Homo sapiens
IKPSGGNT

SEQ ID NO: 1768 - protein, 10 aa, Homo sapiens
ARTGDRAFDV

SEQ ID NO: 1769 - DNA, 330 bp, Homo sapiens
cagtctgtgttgacgcagccgccctcagtgtctgcggccccaggacagaaggtcaccatctcctgctctggaagcagctccaacattgggaataattatgtttcctggtaccagcagttcccaggaacagcccccaaactcctcatttatgacaataataagcgaccctcagggattcctgaccgattctctggctccaagtctggcacgtcagccaccctgggcatcaccggactccagactggggacgaggccgattattactgcgtaacatgggatagcagcctgggtgctggggtgttcggcggagggaccaagctgaccgtccta

SEQ ID NO: 1770 - protein, 110 aa, Homo sapiens
QSVLTQPPSVSAAPGQKVTISCSGSSSNIGNNYVSWYQQFPGTAPKLLIYDNNKRPSGIPDRFSGSKSGTSATLGITGLQTGDEADYYCVTWDSSLGAGVFGGGTKLTVL

SEQ ID NO: 1771 - protein, 8 aa, Homo sapiens
SSNIGNNY

SEQ ID NO: 1772 - skipped

SEQ ID NO: 1773 - protein, 11 aa, Homo sapiens
VTWDSSLGAGV

SEQ ID NO: 1774 - DNA, 351 bp, Homo sapiens
cagatgcaattggtgcaatctggggctgaggtgaagaagcctggggcctcagtgaagatttcctgcaagacatctggatacaccttcaccaactactatatggtctgggtgcgacaggcccctggacaaggacttgagtggatgggcataatcaaacctagtggtggtaacacgatctacgcacagaagttccagggcagagtcaccatgaccagggacacgtccacgaataaagtctatttggacctgagcagtctgagatctgaggacacggccgtctattattgtgccagaactggggatagggcttttgatgtctggggccaggggacaatggtcaccgtctcttca

SEQ ID NO: 1775 - protein, 117 aa, Homo sapiens
QMQLVQSGAEVKKPGASVKISCKTSGYTFTNYYMVWVRQAPGQGLEWMGIIKPSGGNTIYAQKFQGRVTMTRDTSTNKVYLDLSSLRSEDTAVYYCARTGDRAFDVWGQGTMVTVSS

SEQ ID NO: 1776 - protein, 8 aa, Homo sapiens
GYTFTNYY

SEQ ID NO: 1777 - protein, 8 aa, Homo sapiens
IKPSGGNT

SEQ ID NO: 1778 - protein, 10 aa, Homo sapiens
ARTGDRAFDV

SEQ ID NO: 1779 - DNA, 330 bp, Homo sapiens; identical to SEQ ID NO: 1379

SEQ ID NO: 1780 - protein, 110 aa, Homo sapiens; identical to SEQ ID NO: 1240

SEQ ID NO: 1781 - protein, 8 aa, Homo sapiens
SSNIGNNF

SEQ ID NO: 1782 - skipped

SEQ ID NO: 1783 - protein, 11 aa, Homo sapiens
GTWDSSLGAGV

SEQ ID NO: 1784 - DNA, 351 bp, Homo sapiens
cagatgcagttggtgcagtctggggctgaggtgaagaagcctggggcctcagtgaagatttcctgcaagacatctggatacaccttcatcaactactatatggtctgggtgcgacaggcccctggacaaggacttgagtggatgggcataatcaaacctagtggtggtaacacgatctacgcacagaagttccagggcagagtcaccatgaccagggacacgtccacgaacacagtctatatggacctgagcagtctgagatctgaggacacggccgtgtattattgtgcgagaattggggatagggcttttgatgtctggggccacgggacaatggtcaccgtctcttca

SEQ ID NO: 1785 - protein, 117 aa, Homo sapiens
QMQLVQSGAEVKKPGASVKISCKTSGYTFINYYMVWVRQAPGQGLEWMGIIKPSGGNTIYAQKFQGRVTMTRDTSTNTVYMDLSSLRSEDTAVYYCARIGDRAFDVWGHGTMVTVSS

SEQ ID NO: 1786 - protein, 8 aa, Homo sapiens
GYTFINYY

SEQ ID NO: 1787 - protein, 8 aa, Homo sapiens
IKPSGGNT

SEQ ID NO: 1788 - protein, 10 aa, Homo sapiens
ARIGDRAFDV

SEQ ID NO: 1789 - DNA, 330 bp, Homo sapiens
cagtctgtgttgacgcagccgccctcagtgtctgcggccccaggacagaaggtcaccatctcctgctctggaagcagctccaacattgggaataactttgtttcctggtaccagcagttcccaggaacagcccccaagctcctcatttatgacaatcataagcgaccctcagggattcctgaccgattctctgcctccaagtctggcacgtcagccaccctgggcatcaccggactccagactggggacgaggccgattattactgcggaacatgggatagcggcctgggtgctggggtgttcggcggagggaccaagctgaccgtccta

SEQ ID NO: 1790 - protein, 110 aa, Homo sapiens; identical to SEQ ID NO: 1590

SEQ ID NO: 1791 - protein, 8 aa, Homo sapiens
SSNIGNNF

SEQ ID NO: 1792 - skipped

SEQ ID NO: 1793 - protein, 11 aa, Homo sapiens
GTWDSGLGAGV

SEQ ID NO: 1794 - DNA, 351 bp, Homo sapiens
cagattcaattggtgcagtctggggctgaggtgaagaagcctggggcctcagtgaagatttcctgcaagacatctggatacaccttcaccaactactatatggtctgggtgcgacaggcccctggacaaggacttgagtggatgggcataatcaaacctagtaatggtaacacgatctacgcacagaagttccagggcagagtcaccatgaccagggacacgtccacgaatatagtctatttggacctgagcagtctgagatctgaggacacggccgtgtattattgtgcgagaactggggatagggcttttgatgtctggggccacgggacaatggtcaccgtctcttca

SEQ ID NO: 1795 - protein, 117 aa, Homo sapiens
QIQLVQSGAEVKKPGASVKISCKTSGYTFTNYYMVWVRQAPGQGLEWMGIIKPSNGNTIYAQKFQGRVTMTRDTSTNIVYLDLSSLRSEDTAVYYCARTGDRAFDVWGHGTMVTVSS

SEQ ID NO: 1796 - protein, 8 aa, Homo sapiens
GYTFTNYY

SEQ ID NO: 1797 - protein, 8 aa, Homo sapiens
IKPSNGNT

SEQ ID NO: 1798 - protein, 10 aa, Homo sapiens
ARTGDRAFDV

SEQ ID NO: 1799 - DNA, 330 bp, Homo sapiens
cagtctgtgttgacgcagccgccctcagtgtctgcggccccaggacagaaggtcaccatctcctgctctggaagcagctccaatattgggaataattatgtttcctggtaccagcagttcccaggaacagtccccaaactcctcatttatgacaataataagcgaccctcagggattcctgaccgattctctggctccaagtctggcacgtcagccaccctgggcatcaccggactccagactggggacgaggccgaatattactgcggaacatgggatagcagcctgggtgctggggtgttcggcggagggaccaagctgaccgtccta

SEQ ID NO: 1800 - protein, 110 aa, Homo sapiens
QSVLTQPPSVSAAPGQKVTISCSGSSSNIGNNYVSWYQQFPGTVPKLLIYDNNKRPSGIPDRFSGSKSGTSATLGITGLQTGDEAEYYCGTWDSSLGAGVFGGGTKLTVL

SEQ ID NO: 1801 - protein, 8 aa, Homo sapiens
SSNIGNNY

SEQ ID NO: 1802 - skipped

SEQ ID NO: 1803 - protein, 11 aa, Homo sapiens
GTWDSSLGAGV

SEQ ID NO: 1804 - DNA, 351 bp, Homo sapiens
cagatacagctggtgcagtctggggctgaggtgaagaagcctggggcctcagtgaggttttcctgcaagacatctggatacaccttcaccaactactacatggtctgggtgcgacaggcccctggacaaggacttgagtggatgggcataatcaaacctagtggtggtgacacaatctacgcacagaacttccagggcagagtcaccatgaccagggacacgtccacgaactcagtctatatggacctgaggagtctgagatctgaggacacggccgtgtattattgtgcgagaactggtgatagggcttttgatgtctggggccaagggacaatggtcaccgtctcttca

SEQ ID NO: 1805 - protein, 117 aa, Homo sapiens
QIQLVQSGAEVKKPGASVRFSCKTSGYTFTNYYMVWVRQAPGQGLEWMGIIKPSGGDTIYAQNFQGRVTMTRDTSTNSVYMDLRSLRSEDTAVYYCARTGDRAFDVWGQGTMVTVSS

SEQ ID NO: 1806 - protein, 8 aa, Homo sapiens
GYTFTNYY

SEQ ID NO: 1807 - protein, 8 aa, Homo sapiens
IKPSGGDT

SEQ ID NO: 1808 - protein, 10 aa, Homo sapiens
ARTGDRAFDV

SEQ ID NO: 1809 - DNA, 330 bp, Homo sapiens
cagtctgtgttgacgcagccgccctcagtgtctgcggccccaggacagaaggtcaccatctcctgctctggacgcagctccaacattgggaataattttgtatcctggtaccagcagttcccaggaacagcccccaaactcctcatttatgacaataataaacgaccctcagggattcctgaccgattctctggctccaagtctggcacgtcagccaccctgggcatcaccgggctccagactggggacgaggccgattattactgcggaacatgggatagcagcctgggtgctggggtgttcggcggagggaccaagctgaccgtccta

SEQ ID NO: 1810 - protein, 110 aa, Homo sapiens
QSVLTQPPSVSAAPGQKVTISCSGRSSNIGNNFVSWYQQFPGTAPKLLIYDNNKRPSGIPDRFSGSKSGTSATLGITGLQTGDEADYYCGTWDSSLGAGVFGGGTKLTVL

SEQ ID NO: 1811 - protein, 8 aa, Homo sapiens
SSNIGNNF

SEQ ID NO: 1812 - skipped

SEQ ID NO: 1813 - protein, 11 aa, Homo sapiens
GTWDSSLGAGV

SEQ ID NO: 1814 - DNA, 351 bp, Homo sapiens
cagatgcaattggtgcagtctggggctgaggtgaagaagcctggggcctcagtgaagatttcctgcaagacatctggattcaccttcgccaactactatgtggtctgggtgcgacaggcccctggacaaggacttgagtggatgggcataatcaaacctagtggtggtaacacgatctacgcacagaagttccagggcagagtcaccatgaccagggacacgtccacgaacacagtctatttggacttgagcagtctgagatctgaggacacggccgtgtattattgtgcgagaactggtgatagggcttttgatgtctggggccacgggacagtggtcaccgtctcttca

SEQ ID NO: 1815 - protein, 117 aa, Homo sapiens
QMQLVQSGAEVKKPGASVKISCKTSGFTFANYYVVWVRQAPGQGLEWMGIIKPSGGNTIYAQKFQGRVTMTRDTSTNTVYLDLSSLRSEDTAVYYCARTGDRAFDVWGHGTVVTVSS

SEQ ID NO: 1816 - protein, 8 aa, Homo sapiens
GFTFANYY

SEQ ID NO: 1817 - protein, 8 aa, Homo sapiens
IKPSGGNT

SEQ ID NO: 1818 - protein, 10 aa, Homo sapiens
ARTGDRAFDV

SEQ ID NO: 1819 - DNA, 330 bp, Homo sapiens; identical to SEQ ID NO: 1579

SEQ ID NO: 1820 - protein, 110 aa, Homo sapiens; identical to SEQ ID NO: 1290

SEQ ID NO: 1821 - protein, 8 aa, Homo sapiens
SSNIGNNY

SEQ ID NO: 1822 - skipped

SEQ ID NO: 1823 - protein, 11 aa, Homo sapiens
GTWDSSLGAGV

SEQ ID NO: 1824 - DNA, 351 bp, Homo sapiens
cagatacagttggtgcagtctggggctgaggtgaagaagcctggggcctcagtgaagctttcctgcaagacatctggatacaccttcaccagctactacatggtctgggtgcgacaggcccctggacaagggcttgaatggatgggcataatcaaacctagtggtggtaacacaatctacgcacagaagttccagggcagagccaccatgaccagggacacgtccacgaacacagtctacatggacctgagcagtctgagatctgaagacacggccgtgtattattgtgcgagaactggggatagggcttttgatgtctggggccacgggacactggtcaccgtctcttca

SEQ ID NO: 1825 - protein, 117 aa, Homo sapiens
QIQLVQSGAEVKKPGASVKLSCKTSGYTFTSYYMVWVRQAPGQGLEWMGIIKPSGGNTIYAQKFQGRATMTRDTSTNTVYMDLSSLRSEDTAVYYCARTGDRAFDVWGHGTLVTVSS

SEQ ID NO: 1826 - protein, 8 aa, Homo sapiens
GYTFTSYY

SEQ ID NO: 1827 - protein, 8 aa, Homo sapiens
IKPSGGNT

SEQ ID NO: 1828 - protein, 10 aa, Homo sapiens
ARTGDRAFDV

SEQ ID NO: 1829 - DNA, 330 bp, Homo sapiens
cagtctgtgttgacgcagccgccctcagtgtctgcggccccaggacagaaggtcaccatctcctgctctggaagcagctccaacattgggaataattatgtatcctggtaccagcagatcccaggaacagcccccaaactcctcatttatgacaataataagcgaccctcagggactcctgcccgatcctctggctccaagtctggcgcgtcagccaccctgggcatcaccggactccagcctggggacgaggccgattattactgcggaacatgggatagcagcctgggtgctggggtgttcggcggagggaccaagctgaccgtcctg

SEQ ID NO: 1830 - protein, 110 aa, Homo sapiens
QSVLTQPPSVSAAPGQKVTISCSGSSSNIGNNYVSWYQQIPGTAPKLLIYDNNKRPSGTPARSSGSKSGASATLGITGLQPGDEADYYCGTWDSSLGAGVFGGGTKLTVL

SEQ ID NO: 1831 - protein, 8 aa, Homo sapiens
SSNIGNNY

SEQ ID NO: 1832 - skipped

SEQ ID NO: 1833 - protein, 11 aa, Homo sapiens
GTWDSSLGAGV

SEQ ID NO: 1834 - DNA, 351 bp, Homo sapiens
cagatacagctggtgcagtctggggctgaggtgaagaagcctggggcctcagtgaacttttcctgcaagacatctggatacaccttcaccaactactatatggtctgggtgcgacaggcccctggacaaggacttgagtggatgggcataatcaaacctagtggtggtaacacaatctacgcacagaagttccagggcagagtcaccatgaccagggacacgtccacgaacacagtctacatggacctgaggagtctgcgatctgaggacacggccgtgtattattgtgcgagaactggggatagggcttttgatgtctggggccaagggacaatggtcaccgtctcttca

SEQ ID NO: 1835 - protein, 117 aa, Homo sapiens
QIQLVQSGAEVKKPGASVNFSCKTSGYTFTNYYMVWVRQAPGQGLEWMGIIKPSGGNTIYAQKFQGRVTMTRDTSTNTVYMDLRSLRSEDTAVYYCARTGDRAFDVWGQGTMVTVSS

SEQ ID NO: 1836 - protein, 8 aa, Homo sapiens
GYTFTNYY

SEQ ID NO: 1837 - protein, 8 aa, Homo sapiens
IKPSGGNT

SEQ ID NO: 1838 - protein, 10 aa, Homo sapiens
ARTGDRAFDV

SEQ ID NO: 1839 - DNA, 330 bp, Homo sapiens; identical to SEQ ID NO: 1299

SEQ ID NO: 1840 - protein, 110 aa, Homo sapiens; identical to SEQ ID NO: 1240

SEQ ID NO: 1841 - protein, 8 aa, Homo sapiens
SSNIGNNF

SEQ ID NO: 1842 - skipped

SEQ ID NO: 1843 - protein, 11 aa, Homo sapiens
GTWDSSLGAGV

SEQ ID NO: 1844 - DNA, 351 bp, Homo sapiens
cagattcagttggtgcagtctggggctgaggtgaagaagcctggggcctcagtgaagctttcctgcaagacatctggatacaccttcaccaactactatatggtctgggtgcgacaggcccctggacaaggacttgagtggatgggcataatcaaacctagtggtggtaacacaatctacgcacagaagttccagggcagagtcaccatgaccagggacacgtccacgaacacagtctacatggacctgaacagtctgagatctgaggacacggccgtctattattgtgcgagaactggagatagggcttttgatgtctggggccacgggacaatggtcaccgtgtcttca

SEQ ID NO: 1845 - protein, 117 aa, Homo sapiens
QIQLVQSGAEVKKPGASVKLSCKTSGYTFTNYYMVWVRQAPGQGLEWMGIIKPSGGNTIYAQKFQGRVTMTRDTSTNTVYMDLNSLRSEDTAVYYCARTGDRAFDVWGHGTMVTVSS

SEQ ID NO: 1846 - protein, 8 aa, Homo sapiens
GYTFTNYY

SEQ ID NO: 1847 - protein, 8 aa, Homo sapiens
IKPSGGNT

SEQ ID NO: 1848 - protein, 10 aa, Homo sapiens
ARTGDRAFDV

SEQ ID NO: 1849 - DNA, 330 bp, Homo sapiens
cagtctgtgttgacgcagccgccctcagtgtctgcggccccaggacagaaggtcaccatctcctgctctggaagcagctccaatattgggaataattatgtatcctggtaccaacagttcccaggaacagcccccaaactcctcatttatgacaataataagcgaccctcagggattcctgaccgattctctggctccaagtctggcacgtcagccaccctgggcatcaccggactccagactggggacgaggccgattattactgcggaacatgggatagcagcctgggtgctggggtgttcggcggagggaccaaactgaccgtccta

SEQ ID NO: 1850 - protein, 110 aa, Homo sapiens; identical to SEQ ID NO: 1290

SEQ ID NO: 1851 - protein, 8 aa, Homo sapiens
SSNIGNNY

SEQ ID NO: 1852 - skipped

SEQ ID NO: 1853 - protein, 11 aa, Homo sapiens
GTWDSSLGAGV

SEQ ID NO: 1854 - DNA, 351 bp, Homo sapiens
cagatgcaattggtgcagtctggggctgaggtgaagaagcctggggcctcagtgaagattttctgcaagacatctggataccccttcagcaactactatatggtctgggtgcgacaggcccctggacaaggacttgagtggctgggcataatcaaacctagtggtggtaacacgatctacgcacagaagttccagggcagagtcaccatgaccagggacacgtccacgaatacagtctatttggacctgaccagtctgagatctgaggacacggccgtgtattattgtgcgcgaactggggatagggcttttgatgtctggggccacgggacaatggtcaccgtctcttca

SEQ ID NO: 1855 - protein, 117 aa, Homo sapiens
QMQLVQSGAEVKKPGASVKIFCKTSGYPFSNYYMVWVRQAPGQGLEWLGIIKPSGGNTIYAQKFQGRVTMTRDTSTNTVYLDLTSLRSEDTAVYYCARTGDRAFDVWGHGTMVTVSS

SEQ ID NO: 1856 - protein, 8 aa, Homo sapiens
GYPFSNYY

SEQ ID NO: 1857 - protein, 8 aa, Homo sapiens
IKPSGGNT

SEQ ID NO: 1858 - protein, 10 aa, Homo sapiens
ARTGDRAFDV

SEQ ID NO: 1859 - DNA, 330 bp, Homo sapiens
cagtctgtgttgacgcagccgccctcagtgtctgcggccccaggacagaaggtcaccatctcctgctctggaagcagttccaacattgggagtaattatgtttcctggtaccagcagttcccaggaacagcccccaaactcctcatttatgacaataataagcgaccctcagggattcctgaccgattctctggctccaagtctggcacgtcagccaccctgggcatcaccggactccagactggggacgaggccgattattactgcggaacatgggatagcagcctgggtgctggggtgttcggcggagggaccaagctgaccgtccta

SEQ ID NO: 1860 - protein, 110 aa, Homo sapiens
QSVLTQPPSVSAAPGQKVTISCSGSSSNIGSNYVSWYQQFPGTAPKLLIYDNNKRPSGIPDRFSGSKSGTSATLGITGLQTGDEADYYCGTWDSSLGAGVFGGGTKLTVL

SEQ ID NO: 1861 - protein, 8 aa, Homo sapiens
SSNIGSNY

SEQ ID NO: 1862 - skipped

SEQ ID NO: 1863 - protein, 11 aa, Homo sapiens
GTWDSSLGAGV

SEQ ID NO: 1864 - DNA, 351 bp, Homo sapiens
cagatacaactggtgcagtctggggctgaggtgaagaagcctggggcctcagtgaggttttcctgcaagacatctggatacaccttcaccaactactatatggtctgggtgcgacaggcccctggacaaggacttgagtggatgggcataatcaaacctagtggtggtaacaccatctacgcacagaacttccagggcagagtcaccatgaccagggacacgtccacgagcacagtctacatggacctgaggagtctgagatctgaggacacggccgtgtattattgtgcgagaactggtgatagggcttttgatgtctggggccaagggacaatggtcaccgtctcttca

SEQ ID NO: 1865 - protein, 117 aa, Homo sapiens
QIQLVQSGAEVKKPGASVRFSCKTSGYTFTNYYMVWVRQAPGQGLEWMGIIKPSGGNTIYAQNFQGRVTMTRDTSTSTVYMDLRSLRSEDTAVYYCARTGDRAFDVWGQGTMVTVSS

SEQ ID NO: 1866 - protein, 8 aa, Homo sapiens
GYTFTNYY

SEQ ID NO: 1867 - protein, 8 aa, Homo sapiens
IKPSGGNT

SEQ ID NO: 1868 - protein, 10 aa, Homo sapiens
ARTGDRAFDV

SEQ ID NO: 1869 - DNA, 330 bp, Homo sapiens
cagtctgtcttgactcagccgccctcagtgtctgctgccccaggacagaaggtcaacatctcctgctctggaagcagctccaacattgggaataattttgtatcctggtaccagcagttctcaggaaccgcccccaaactcctcatttatgacaataataagcgaccctcagggattcctgaccgattctctggctccaagtctggcacgtcagccaccctgggcatcaccggactccagactggggacgaggccgattattactgcggaacatgggatagcagcctgggtgctggggtgttcggcggagggaccaagctgaccgtccta

SEQ ID NO: 1870 - protein, 110 aa, Homo sapiens
QSVLTQPPSVSAAPGQKVNISCSGSSSNIGNNFVSWYQQFSGTAPKLLIYDNNKRPSGIPDRFSGSKSGTSATLGITGLQTGDEADYYCGTWDSSLGAGVFGGGTKLTVL

SEQ ID NO: 1871 - protein, 8 aa, Homo sapiens
SSNIGNNF

SEQ ID NO: 1872 - skipped

SEQ ID NO: 1873 - protein, 11 aa, Homo sapiens
GTWDSSLGAGV

SEQ ID NO: 1874 - DNA, 351 bp, Homo sapiens
cagatgcagttggtgcagtctggggctgaggtgaagaagcctggggcctcagtgaagatttcctgcaagacatctggatatatcttcaccaagtactatatggtctgggtgcgacaggccccgggacaaggacttgagtggatgggcataatcaaacctagtggcggtgacacgatctacgcacagaagttccagggcagagtcaccatgaccagggacacgtccacgaacacagtctatatggacctgagcagtctgagatctgaggacacggccgtgtattattgtgcgagaactggaaatagggcttttgatgtctggggccacgggacaatggtcaccgtctcttca

SEQ ID NO: 1875 - protein, 117 aa, Homo sapiens
QMQLVQSGAEVKKPGASVKISCKTSGYIFTKYYMVWVRQAPGQGLEWMGIIKPSGGDTIYAQKFQGRVTMTRDTSTNTVYMDLSSLRSEDTAVYYCARTGNRAFDVWGHGTMVTVSS

SEQ ID NO: 1876 - protein, 8 aa, Homo sapiens
GYIFTKYY

SEQ ID NO: 1877 - protein, 8 aa, Homo sapiens
IKPSGGDT

SEQ ID NO: 1878 - protein, 10 aa, Homo sapiens
ARTGNRAFDV

SEQ ID NO: 1879 - DNA, 330 bp, Homo sapiens
cagtctgtgttgacgcagccgccctcagtgtctgcggccccaggacagaaggtcaccgtctcctgctctggaagcagctccaacattgggaataattttgtttcctggtaccagcagttcccaggaacagcccccaaactcctcatttatgacaataataagcgaccctcagggattcctgaccgattctctggctccaagtctggcacgtcagccaccctgggcatcaccggactccagactggggacgaggccgattattactgcggaacatgggatagcagcctgggtgctggggtgttcggcggagggaccaagctggccgtcctt

SEQ ID NO: 1880 - protein, 110 aa, Homo sapiens
QSVLTQPPSVSAAPGQKVTVSCSGSSSNIGNNFVSWYQQFPGTAPKLLIYDNNKRPSGIPDRFSGSKSGTSATLGITGLQTGDEADYYCGTWDSSLGAGVFGGGTKLAVL

SEQ ID NO: 1881 - protein, 8 aa, Homo sapiens
SSNIGNNF

SEQ ID NO: 1882 - skipped

SEQ ID NO: 1883 - protein, 11 aa, Homo sapiens
GTWDSSLGAGV

SEQ ID NO: 1884 - DNA, 351 bp, Homo sapiens
cagattcagttggtgcagtctggggctgaggtgaagaagcctggggcctcagtgaggttttcctgcaagacatctggatacaccttcaccagctactatatggtctgggtgcgacaggcccctggacaaggacttgagtggatgggcataatcaaacctagtggtggtaacacaatctacgcacagaagttccagggcagagtcaccatgaccagggacacgtccacgcacacagtctatatggacctgagcagtctgagatctgaggacacggccgtatattattgtgcgagaactggtgatagggcttttgatgtctggggccacgggacaatgatcaccgtctcttca

SEQ ID NO: 1885 - protein, 117 aa, Homo sapiens
QIQLVQSGAEVKKPGASVRFSCKTSGYTFTSYYMVWVRQAPGQGLEWMGIIKPSGGNTIYAQKFQGRVTMTRDTSTHTVYMDLSSLRSEDTAVYYCARTGDRAFDVWGHGTMITVSS

SEQ ID NO: 1886 - protein, 8 aa, Homo sapiens
GYTFTSYY

SEQ ID NO: 1887 - protein, 8 aa, Homo sapiens
IKPSGGNT

SEQ ID NO: 1888 - protein, 10 aa, Homo sapiens
ARTGDRAFDV

SEQ ID NO: 1889 - DNA, 330 bp, Homo sapiens
cagtctgtattgacgcagccgccctcagtgtctgcggccccaggacagaaggtcaccatctcctgctctggaagcagctccaacattggaaataattttgtatcctggtaccaacagttcccaggaacagcccccaaactcctcatttatgacaataataagcgaccctcagggattcctgaccgattctctggctccaagtctggcacgtcagccaccctgggcatcaccggactccagactggggacgaggccgattattactgcggaacatgggatagcagcctgggtgctggggtgttcggcggagggaccaagctgaccgtccta

SEQ ID NO: 1890 - protein, 110 aa, Homo sapiens; identical to SEQ ID NO: 1240

SEQ ID NO: 1891 - protein, 8 aa, Homo sapiens
SSNIGNNF

SEQ ID NO: 1892 - skipped

SEQ ID NO: 1893 - protein, 11 aa, Homo sapiens
GTWDSSLGAGV

SEQ ID NO: 1894 - DNA, 351 bp, Homo sapiens
cagatacagctggtgcagtctggggctgaggtgcagaagcctggggcctcagtgaagttttcctgcaagacatctggatacaccttcaccaacttctatatcgtctgggtgcgacaggcccctggacaaggacttgagtggatgggcataatcaaacctagtggtggtaacacaatctacgcacagaatttccagggcagagtcaccatgaccagggacacgtccacgaacacaatctacatggacctgaggagtctgagatctgaggacacggccgtgtattattgtgcgagaactggggatagggcttttgatgtctggggccaagggacaatggtcaccgtctcttca

SEQ ID NO: 1895 - protein, 117 aa, Homo sapiens
QIQLVQSGAEVQKPGASVKFSCKTSGYTFTNFYIVWVRQAPGQGLEWMGIIKPSGGNTIYAQNFQGRVTMTRDTSTNTIYMDLRSLRSEDTAVYYCARTGDRAFDVWGQGTMVTVSS

SEQ ID NO: 1896 - protein, 8 aa, Homo sapiens
GYTFTNFY

SEQ ID NO: 1897 - protein, 8 aa, Homo sapiens
IKPSGGNT

SEQ ID NO: 1898 - protein, 10 aa, Homo sapiens
ARTGDRAFDV

SEQ ID NO: 1899 - DNA, 330 bp, Homo sapiens
cagtctgtgttgacgcagccgccctcagtgtctgcggccccaggacagaaggtcaccatctcctgctctggaagcagctccaacattgggaataattttgtatcctggtaccagcagttcccaggaacagcccccaaactcctcatttatgacaatcataagcgaccctcagggattcctgaccgattctctggctccaagtctggcacgtcagccaccctgggcatcaccggactccagactggggacgaggccgattattactgcggaacatgggatagcagcctgggtgctggggtgttcggcggagggaccaagttgaccgtccta

SEQ ID NO: 1900 - protein, 110 aa, Homo sapiens
QSVLTQPPSVSAAPGQKVTISCSGSSSNIGNNFVSWYQQFPGTAPKLLIYDNHKRPSGIPDRFSGSKSGTSATLGITGLQTGDEADYYCGTWDSSLGAGVFGGGTKLTVL

SEQ ID NO: 1901 - protein, 8 aa, Homo sapiens
SSNIGNNF

SEQ ID NO: 1902 - skipped

SEQ ID NO: 1903 - protein, 11 aa, Homo sapiens
GTWDSSLGAGV

SEQ ID NO: 1904 - DNA, 351 bp, Homo sapiens
cagatgcaattggtgcagtctggggctgaggtgaagaagcctggggcctcagtgaagatttcctgcaagacatctggatacaccttcaccaactactatatggtctgggtgcgacaggcccctggacaaggacttgagtggatgggcataatcaaacctagtggtggtaacacgatctacgcacagaagttccagggcagagtcatcatgaccagggacacgtccacgaacacagtctatttggacctgaacagtctgagatctgaggacacggccgtgtattattgtgcgaaaactggggatagggcttttaatgtctggggccacgggacaatggtcaccgtctcttca

SEQ ID NO: 1905 - protein, 117 aa, Homo sapiens
QMQLVQSGAEVKKPGASVKISCKTSGYTFTNYYMVWVRQAPGQGLEWMGIIKPSGGNTIYAQKFQGRVIMTRDTSTNTVYLDLNSLRSEDTAVYYCAKTGDRAFNVWGHGTMVTVSS

SEQ ID NO: 1906 - protein, 8 aa, Homo sapiens
GYTFTNYY

SEQ ID NO: 1907 - protein, 8 aa, Homo sapiens
IKPSGGNT

SEQ ID NO: 1908 - protein, 10 aa, Homo sapiens
AKTGDRAFNV

SEQ ID NO: 1909 - DNA, 330 bp, Homo sapiens
cagtctgtgttgacgcagccgccctcagtgtctgcggccccaggacagaaggtcaccatctcctgctctggaagcagctccaacattcgaaataattatgtttcctggtaccagcagttcccaggaacagcccccaaactcctcatttatgacaataataagcgaccctcagggattcctgaccgattctctggctccaagtctggcacgtctgccaccctgggcatcaccggactccagactggggacgaggccgattattactgcggaacatgggatagcagcctgggtgctggggtgttcggcggagggaccaagctgaccgtcctt

SEQ ID NO: 1910 - protein, 110 aa, Homo sapiens
QSVLTQPPSVSAAPGQKVTISCSGSSSNIRNNYVSWYQQFPGTAPKLLIYDNNKRPSGIPDRFSGSKSGTSATLGITGLQTGDEADYYCGTWDSSLGAGVFGGGTKLTVL

SEQ ID NO: 1911 - protein, 8 aa, Homo sapiens
SSNIRNNY

SEQ ID NO: 1912 - skipped

SEQ ID NO: 1913 - protein, 11 aa, Homo sapiens
GTWDSSLGAGV

SEQ ID NO: 1914 - DNA, 351 bp, Homo sapiens; identical to SEQ ID NO: 1404

SEQ ID NO: 1915 - protein, 117 aa, Homo sapiens; identical to SEQ ID NO: 1405

SEQ ID NO: 1916 - protein, 8 aa, Homo sapiens
GYTFTNYY

SEQ ID NO: 1917 - protein, 8 aa, Homo sapiens
IKPSGGNT

SEQ ID NO: 1918 - protein, 10 aa, Homo sapiens
ARTGDRAFDV

SEQ ID NO: 1919 - DNA, 330 bp, Homo sapiens; identical to SEQ ID NO: 1299

SEQ ID NO: 1920 - protein, 110 aa, Homo sapiens; identical to SEQ ID NO: 1240

SEQ ID NO: 1921 - protein, 8 aa, Homo sapiens
SSNIGNNF

SEQ ID NO: 1922 - skipped

SEQ ID NO: 1923 - protein, 11 aa, Homo sapiens
GTWDSSLGAGV

SEQ ID NO: 1924 - DNA, 351 bp, Homo sapiens
cagctgcagctggtgcagtctggggctgaggtgaagaagcctggggcctcagtgaagatttcctgcaagacatctggatacaccttcaccagttactatatggtctgggtgcgacaggcccctggacaaggacttgaatggatgggcataatcaaacctagtggtggtaacacaatctacgcacagaagttccagggcagagtcaccatgaccagggacacgtccacgaatacagtcttcatggacctgaggagtctgagatctgaagacacggccgtgtattattgtgcgagaactggggatagggcttttgatgtctggggccaagggacactggtcaccgtctctaca

SEQ ID NO: 1925 - protein, 117 aa, Homo sapiens
QLQLVQSGAEVKKPGASVKISCKTSGYTFTSYYMVWVRQAPGQGLEWMGIIKPSGGNTIYAQKFQGRVTMTRDTSTNTVFMDLRSLRSEDTAVYYCARTGDRAFDVWGQGTLVTVST

SEQ ID NO: 1926 - protein, 8 aa, Homo sapiens
GYTFTSYY

SEQ ID NO: 1927 - protein, 8 aa, Homo sapiens
IKPSGGNT

SEQ ID NO: 1928 - protein, 10 aa, Homo sapiens
ARTGDRAFDV

SEQ ID NO: 1929 - DNA, 330 bp, Homo sapiens
cagtctgtgttgacgcagccgccctcagtgtctgcggccccaggacagaaggtcaccatctcctgctctggaagcagctccaacattgggaataattttgtttcctggtacctgcagttcccaggaacagcccccaaactcctcatttatgacaataataagcgaccctcagggattcctgaccgattctctggctccaagtctggcacgtcagccaccctgggcatcaccggactccagactggggacgaggccgattattactgcggaacatgggatagcagcctgggtgctggggtgttcggcggagggacccagctgaccgtccta

SEQ ID NO: 1930 - protein, 110 aa, Homo sapiens
QSVLTQPPSVSAAPGQKVTISCSGSSSNIGNNFVSWYLQFPGTAPKLLIYDNNKRPSGIPDRFSGSKSGTSATLGITGLQTGDEADYYCGTWDSSLGAGVFGGGTQLTVL

SEQ ID NO: 1931 - protein, 8 aa, Homo sapiens
SSNIGNNF

SEQ ID NO: 1932 - skipped

SEQ ID NO: 1933 - protein, 11 aa, Homo sapiens
GTWDSSLGAGV

SEQ ID NO: 1934 - DNA, 351 bp, Homo sapiens
cagatgcagttggtgcagtctggggctgaggtgaagaagcctggggcctcagtgaagatttcctgcaagacatctggatacaccttcaccaactactatatggtctgggtgcgacaggccccgggacaaggacttgagtggatgggcataatcaaacctagtggcggtgacacgatctacgcacagaagttccagggcagagtcaccatgaccagggacacgtccacgaacacagtctatatggacctgaccagtctgagatctgaggacacggccgtctattattgtgcgagaactgggaatagggcttttgatgtctggggccacgggacaatggtcaccgtctcttca

SEQ ID NO: 1935 - protein, 117 aa, Homo sapiens
QMQLVQSGAEVKKPGASVKISCKTSGYTFTNYYMVWVRQAPGQGLEWMGIIKPSGGDTIYAQKFQGRVTMTRDTSTNTVYMDLTSLRSEDTAVYYCARTGNRAFDVWGHGTMVTVSS

SEQ ID NO: 1936 - protein, 8 aa, Homo sapiens
GYTFTNYY

SEQ ID NO: 1937 - protein, 8 aa, Homo sapiens
IKPSGGDT

SEQ ID NO: 1938 - protein, 10 aa, Homo sapiens
ARTGNRAFDV

SEQ ID NO: 1939 - DNA, 330 bp, Homo sapiens
cagtctgtgttgacgcagccgccctcagtgtctgcggccccaggacagaaggtcaccatctcctgctctggaagcagctccaatattgggaataattatgtttcctggtaccagcagttcccaggaacagcccccaaactcctcatttatgacaataataagcgaccctcagggattcctgaccgattctctggctccaggtctggcacgtcagccaccctgggcatcaccggactccagactggggacgaggccgattattactgcggaacatgggatagcagcctgggtgctggggtgttcggcggagggaccaagctgaccgtccta

SEQ ID NO: 1940 - protein, 110 aa, Homo sapiens
QSVLTQPPSVSAAPGQKVTISCSGSSSNIGNNYVSWYQQFPGTAPKLLIYDNNKRPSGIPDRFSGSRSGTSATLGITGLQTGDEADYYCGTWDSSLGAGVFGGGTKLTVL

SEQ ID NO: 1941 - protein, 8 aa, Homo sapiens
SSNIGNNY

SEQ ID NO: 1942 - skipped

SEQ ID NO: 1943 - protein, 11 aa, Homo sapiens
GTWDSSLGAGV

SEQ ID NO: 1944 - DNA, 351 bp, Homo sapiens
cagatgcaattggtgcagtctggggctgaggtgaagaagcctggggcctcagtgaagatttcctgcaagacatctggatacaccttcaccaactactatatggtctgggtgcgacaggcccctggacaaggacttgagtggatgggcataatcaaacctagtggtggtaacacgatctacgcacagaagtttcagggcagagtcaccatggccagggacacgtccacgaacacagtctatttggacctgagcagtctgagatctgaggacacggccgtgtattattgtgcgagaactggggatagggcttttgatgtctggggccacgggacaatggtcaccgtctcttca

SEQ ID NO: 1945 - protein, 117 aa, Homo sapiens
QMQLVQSGAEVKKPGASVKISCKTSGYTFTNYYMVWVRQAPGQGLEWMGIIKPSGGNTIYAQKFQGRVTMARDTSTNTVYLDLSSLRSEDTAVYYCARTGDRAFDVWGHGTMVTVSS

SEQ ID NO: 1946 - protein, 8 aa, Homo sapiens
GYTFTNYY

SEQ ID NO: 1947 - protein, 8 aa, Homo sapiens
IKPSGGNT

SEQ ID NO: 1948 - protein, 10 aa, Homo sapiens
ARTGDRAFDV

SEQ ID NO: 1949 - DNA, 330 bp, Homo sapiens
cagtctgtgttgacgcagccgccctcagtgtctgcggctccaggacagaaggtcaccatctcctgctctggaagcagctccaacattgggaataattatgtttcctggtaccagcagttcccaggaacagcccccaaactcctcatttatgacaataataagcgaccctcagggattcctgaccgattctctggctccaagtctggcacgtcagtcaccctgggcatcaccggactccagactggggacgaggccgattattactgcggaacatgggatatcagcctgggtgctggggtgttcggcggagggaccaagctgaccgtccta

SEQ ID NO: 1950 - protein, 110 aa, Homo sapiens
QSVLTQPPSVSAAPGQKVTISCSGSSSNIGNNYVSWYQQFPGTAPKLLIYDNNKRPSGIPDRFSGSKSGTSVTLGITGLQTGDEADYYCGTWDISLGAGVFGGGTKLTVL

SEQ ID NO: 1951 - protein, 8 aa, Homo sapiens
SSNIGNNY

SEQ ID NO: 1952 - skipped

SEQ ID NO: 1953 - protein, 11 aa, Homo sapiens
GTWDISLGAGV

SEQ ID NO: 1954 - DNA, 351 bp, Homo sapiens
cagatacagttggtgcagtctggggctgaggtgaagaagcctggggcctcagtgaagttttcctgcaagacatctggatacaccttcaccaactactatatggtctgggtgcgacaggcccctggacaaggacttgagtggatgggcataatcaaacctagtggtggtaacacaatctacgcacagaatttccagggcagagtcaccatgaccagggacacgtccacgaacacagtctacatggacctgaggagtctgagatctgaggacacggccgtgtattattgtgcgagaactgctgatagggcttttgatgtctggggccaagggacaatggtcaccgtctcttca

SEQ ID NO: 1955 - protein, 117 aa, Homo sapiens
QIQLVQSGAEVKKPGASVKFSCKTSGYTFTNYYMVWVRQAPGQGLEWMGIIKPSGGNTIYAQNFQGRVTMTRDTSTNTVYMDLRSLRSEDTAVYYCARTADRAFDVWGQGTMVTVSS

SEQ ID NO: 1956 - protein, 8 aa, Homo sapiens
GYTFTNYY

SEQ ID NO: 1957 - protein, 8 aa, Homo sapiens
IKPSGGNT

SEQ ID NO: 1958 - protein, 10 aa, Homo sapiens
ARTADRAFDV

SEQ ID NO: 1959 - DNA, 330 bp, Homo sapiens
cagtctgtgttgacgcagccgccctcagtgtctgcggccccaggacagaaggtcaccatctcctgctctggaagcagctccaacattgggaataattttgtatcctggtaccagcagttcccaggaacagcccccaaactcctcatttatgacaataataagcgaccctcagggattcctgaccgattctctggctccaagtctggcacgtcagccaccctgggcatcaccggactccagactggggacgaggccgattattactgcggaacatgggatagcagcctgggtgctggggtgttcggcggagggaccatgttgaccgtccta

SEQ ID NO: 1960 - protein, 110 aa, Homo sapiens
QSVLTQPPSVSAAPGQKVTISCSGSSSNIGNNFVSWYQQFPGTAPKLLIYDNNKRPSGIPDRFSGSKSGTSATLGITGLQTGDEADYYCGTWDSSLGAGVFGGGTMLTVL

SEQ ID NO: 1961 - protein, 8 aa, Homo sapiens
SSNIGNNF

SEQ ID NO: 1962 - skipped

SEQ ID NO: 1963 - protein, 11 aa, Homo sapiens
GTWDSSLGAGV

SEQ ID NO: 1964 - DNA, 351 bp, Homo sapiens
cagattcagttggtgcagtctggggctgaggtgaagaagcctggggcctcagtgaagctttcctgcaagacatctggatacaccttcaccagctactatatggtctgggtgcgacaggcccctggacaaggacttgagtggatgggcataatcaaacctagtggtggtaacacaatctacgcacagaagttccagggcagagtcaccatgaccagggacacgtccacgaacacagtctacatggacctgaacagtctgagatctgaggacacggccgtctattattgtgcgagaactggagatagggcttttgatgtctggggccacgggacaatggtcaccgtgtcttca

SEQ ID NO: 1965 - protein, 117 aa, Homo sapiens; identical to SEQ ID NO: 1435

SEQ ID NO: 1966 - protein, 8 aa, Homo sapiens
GYTFTSYY

SEQ ID NO: 1967 - protein, 8 aa, Homo sapiens
IKPSGGNT

SEQ ID NO: 1968 - protein, 10 aa, Homo sapiens
ARTGDRAFDV

SEQ ID NO: 1969 - DNA, 330 bp, Homo sapiens; identical to SEQ ID NO: 1349

SEQ ID NO: 1970 - protein, 110 aa, Homo sapiens; identical to SEQ ID NO: 1290

SEQ ID NO: 1971 - protein, 8 aa, Homo sapiens
SSNIGNNY

SEQ ID NO: 1972 - skipped

SEQ ID NO: 1973 - protein, 11 aa, Homo sapiens
GTWDSSLGAGV

SEQ ID NO: 1974 - DNA, 351 bp, Homo sapiens
cagatgcaattggtgcagtctggggctgaggtgaagaagcctggggcctcagtgaagatttcctgcaagacatctggatacaccttcaccaactactatatggtctgggtgcgacaggcccctggacaaggacttgagtggatgggcataatcaaacctagtggtggtaacgcgatctacgcacagaagttccagggcagagtcaccatgaccagggacacgtccacgaacacagtctatttggacctgagcagtctgagatctgaggacacggccgtgtactattgtgcgagaactggagatagggcttttgatgtctggggccacgggacaatggtcaccgtctcttca

SEQ ID NO: 1975 - protein, 117 aa, Homo sapiens
QMQLVQSGAEVKKPGASVKISCKTSGYTFTNYYMVWVRQAPGQGLEWMGIIKPSGGNAIYAQKFQGRVTMTRDTSTNTVYLDLSSLRSEDTAVYYCARTGDRAFDVWGHGTMVTVSS

SEQ ID NO: 1976 - protein, 8 aa, Homo sapiens
GYTFTNYY

SEQ ID NO: 1977 - protein, 8 aa, Homo sapiens
IKPSGGNA

SEQ ID NO: 1978 - protein, 10 aa, Homo sapiens
ARTGDRAFDV

SEQ ID NO: 1979 - DNA, 330 bp, Homo sapiens; identical to SEQ ID NO: 1519

SEQ ID NO: 1980 - protein, 110 aa, Homo sapiens; identical to SEQ ID NO: 1290

SEQ ID NO: 1981 - protein, 8 aa, Homo sapiens
SSNIGNNY

SEQ ID NO: 1982 - skipped

SEQ ID NO: 1983 - protein, 11 aa, Homo sapiens
GTWDSSLGAGV

SEQ ID NO: 1984 - DNA, 351 bp, Homo sapiens
cagatacagctggtgcagtctggggctgaggtgaagaagcctggggcctcagtgaagttttcctgcaagacatctggatacattttcaccaactactatatggtctgggtgcgacaggcccctggacaaggacttgagtggatgggcataatcaaacctagtggaggtaacacaatctacgcacagaagttccagggcagagtcaccatgaccagggacacgtccactaacacagtctacatggacctgaataatctgagatctgaggacacggccgtgtatttttgtgcgagaactggtgatagggcttttgatgtctggggccaagggtcaatggtcaccgtctcttca

SEQ ID NO: 1985 - protein, 117 aa, Homo sapiens
QIQLVQSGAEVKKPGASVKFSCKTSGYIFTNYYMVWVRQAPGQGLEWMGIIKPSGGNTIYAQKFQGRVTMTRDTSTNTVYMDLNNLRSEDTAVYFCARTGDRAFDVWGQGSMVTVSS

SEQ ID NO: 1986 - protein, 8 aa, Homo sapiens
GYIFTNYY

SEQ ID NO: 1987 - protein, 8 aa, Homo sapiens
IKPSGGNT

SEQ ID NO: 1988 - protein, 10 aa, Homo sapiens
ARTGDRAFDV

SEQ ID NO: 1989 - DNA, 330 bp, Homo sapiens
cagtctgtgttgacgcagccgccctcaatgtctgcggccccaggacagaaggtcaccatctcctgctctggaagcagctccaacattgggaataattttgtatcctggtaccggcagttccccggaacagcccccaaactcctcatttatgacaataataagcgaccctcagggattcctgaccgattctctggctccaagtctggcacgtcagccaccctgggcatcaccggactccagactggggacgaggccgattattactgcgggacatgggatagcagcctgagtgctggggtgttcggcggagggaccaagctgaccgtccta

SEQ ID NO: 1990 - protein, 110 aa, Homo sapiens
QSVLTQPPSMSAAPGQKVTISCSGSSSNIGNNFVSWYRQFPGTAPKLLIYDNNKRPSGIPDRFSGSKSGTSATLGITGLQTGDEADYYCGTWDSSLSAGVFGGGTKLTVL

SEQ ID NO: 1991 - protein, 8 aa, Homo sapiens
SSNIGNNF

SEQ ID NO: 1992 - skipped

SEQ ID NO: 1993 - protein, 11 aa, Homo sapiens
GTWDSSLSAGV

SEQ ID NO: 1994 - DNA, 351 bp, Homo sapiens
cagatgcagttggtgcagtctggggctgaggtgaagaagcctggggcctcagtgaagatttcctgcaagacatctggatatattttcaccaactactatatggtctgggtgcgacaggcctctggacaaggacttgagtggatgggcataatcaaacctagtggtggtaacacgatctacgcacagaggttccagggcagagtcaccatgaccagagacacgtccacgaacacagtctatatggacctgagcagtctgagatctgaggacacggccgtgtattattgtgcgagaactgggaatagggcttttgatgtctggggccacgggacaatggtcaccgtctcttca

SEQ ID NO: 1995 - protein, 117 aa, Homo sapiens
QMQLVQSGAEVKKPGASVKISCKTSGYIFTNYYMVWVRQASGQGLEWMGIIKPSGGNTIYAQRFQGRVTMTRDTSTNTVYMDLSSLRSEDTAVYYCARTGNRAFDVWGHGTMVTVSS

SEQ ID NO: 1996 - protein, 8 aa, Homo sapiens
GYIFTNYY

SEQ ID NO: 1997 - protein, 8 aa, Homo sapiens
IKPSGGNT

SEQ ID NO: 1998 - protein, 10 aa, Homo sapiens
ARTGNRAFDV

SEQ ID NO: 1999 - DNA, 330 bp, Homo sapiens; identical to SEQ ID NO: 1659

SEQ ID NO: 2000 - protein, 110 aa, Homo sapiens; identical to SEQ ID NO: 1660

SEQ ID NO: 2001 - protein, 8 aa, Homo sapiens
SSNIANNY

SEQ ID NO: 2002 - skipped

SEQ ID NO: 2003 - protein, 11 aa, Homo sapiens
GTWDSSLGAGV

SEQ ID NO: 2004 - DNA, 351 bp, Homo sapiens
cagattcagttggtgcagtctggggctgaggtgaagaagcctggggcctcagtgaagttttcctgcaagacatctggatacaccttcaccagttactatatggtctgggtgcgacaggcccctggacaaggacttgagtggatgggcataatcaaacctagtggtggtaacacaatctacgcacagaagttccagggcagagtcaccatgaccagggacacgtccacgaacacagtctacatggacctgaacagtctgagatctgaggacacggccgtctattattgtgcgagaactggagatagggcttttgatgtctggggccacgggacaatggtcaccgtgtcttca

SEQ ID NO: 2005 - protein, 117 aa, Homo sapiens; identical to SEQ ID NO: 1635

SEQ ID NO: 2006 - protein, 8 aa, Homo sapiens
GYTFTSYY

SEQ ID NO: 2007 - protein, 8 aa, Homo sapiens
IKPSGGNT

SEQ ID NO: 2008 - protein, 10 aa, Homo sapiens
ARTGDRAFDV

SEQ ID NO: 2009 - DNA, 330 bp, Homo sapiens
cagtctgtgttgacgcagccgccctcagtgtctgcggccccaggacagaaggtcaccatctcctgctctggaagcagctccaacattgggaataattatgtatcctggtaccagcagtttgcaggaacagcccccaaactcctcatttatgacaataataagcgaccctcagggattcctgaccgattctctggctccaagtctggcacgtcagccaccctgggcatcgccggactccagactggggacgaggccgattattactgcggaacatgggatagcagcctgggtgctggggtgttcggcggagggaccaaactgaccgtccta

SEQ ID NO: 2010 - protein, 110 aa, Homo sapiens
QSVLTQPPSVSAAPGQKVTISCSGSSSNIGNNYVSWYQQFAGTAPKLLIYDNNKRPSGIPDRFSGSKSGTSATLGIAGLQTGDEADYYCGTWDSSLGAGVFGGGTKLTVL

SEQ ID NO: 2011 - protein, 8 aa, Homo sapiens
SSNIGNNY

SEQ ID NO: 2012 - skipped

SEQ ID NO: 2013 - protein, 11 aa, Homo sapiens
GTWDSSLGAGV

SEQ ID NO: 2014 - DNA, 351 bp, Homo sapiens
cagattcagttggtgcagtctggggctgaggtgaagaagcctggggcctcagtgaagttttcctgcaagacatctggatacagcttcatcaattattatatggtctgggtgcgccaggcccctggacaaggacttgagtggatgggcataatcaaacctagtggtggtaacacaatctacgcacagaagttccagggcagagtcaccatgaccagggacacgtccacgaacacagtctacatggacctgcgcagtctgagatctgaggacacggccgtatattattgtgcgagaactggggatagggcttttgatgtctggggccacgggacaatgatcaccgtctcttca

SEQ ID NO: 2015 - protein, 117 aa, Homo sapiens
QIQLVQSGAEVKKPGASVKFSCKTSGYSFINYYMVWVRQAPGQGLEWMGIIKPSGGNTIYAQKFQGRVTMTRDTSTNTVYMDLRSLRSEDTAVYYCARTGDRAFDVWGHGTMITVSS

SEQ ID NO: 2016 - protein, 8 aa, Homo sapiens
GYSFINYY

SEQ ID NO: 2017 - protein, 8 aa, Homo sapiens
IKPSGGNT

SEQ ID NO: 2018 - protein, 10 aa, Homo sapiens
ARTGDRAFDV

SEQ ID NO: 2019 - DNA, 330 bp, Homo sapiens
cagtctgtgttgacgcagccgccctcagtgtctgcggccccaggacagaaggtcaccatctcctgctctggaagcaactccaacattgggaataattttgtatcctggtaccaacagttcccaggaacagcccccaaactcctcatttatgacaataataagcgaccctcagggattcctgaccgattctctggctccaagtctggcacgtcagccaccctgggcatcaccggactccagactggggacgaggccgattattactgcggaacatgggatagcagcctgggtgctggggtgttcggcggagggaccaagttgaccgtccta

SEQ ID NO: 2020 - protein, 110 aa, Homo sapiens; identical to SEQ ID NO: 1680

SEQ ID NO: 2021 - protein, 8 aa, Homo sapiens
NSNIGNNF

SEQ ID NO: 2022 - skipped

SEQ ID NO: 2023 - protein, 11 aa, Homo sapiens
GTWDSSLGAGV

SEQ ID NO: 2024 - DNA, 351 bp, Homo sapiens
cagattcagttggtgcagtctggggctgaggtgaagaagcctggggcctcagtgaagttttcctgcaagacatctggatacaccttcaccagctactatatggtctgggtgcgacaggcccctggacaaggacttgagtggatgggcataatcaaacctagtggtggtaacacaatctacgcacagaagttccagggcagagtcaccatgaccagggacacgtccacgaacacagtctacatggacctgaacagtctgagatctgaggacacggccgtctattattgtgcgagaactggagatagggcttttgatgtctggggccacgggacaatggtcaccgtgtcttca

SEQ ID NO: 2025 - protein, 117 aa, Homo sapiens; identical to SEQ ID NO: 1635

SEQ ID NO: 2026 - protein, 8 aa, Homo sapiens
GYTFTSYY

SEQ ID NO: 2027 - protein, 8 aa, Homo sapiens
IKPSGGNT

SEQ ID NO: 2028 - protein, 10 aa, Homo sapiens
ARTGDRAFDV

SEQ ID NO: 2029 - DNA, 330 bp, Homo sapiens
cagtctgtgttgacgcagccgccctcagtgtctgcggccccaggacagaaggtcaccatctcctgctctggaagcagctccaacattgggaataattatgtatcctggtaccagcagttcccaggaacagcccccaaactcctcatttatgacaataataagcgaccctcagggattcctgaccgattctctgcttccaagactggcacgtcagccaccctgggcatcaccggaccccagactggggacgaggccgattattactgcggaacatgggatagcagcctgggtgctggggtgttcggcggagggaccaaactgaccgtccta

SEQ ID NO: 2030 - protein, 110 aa, Homo sapiens
QSVLTQPPSVSAAPGQKVTISCSGSSSNIGNNYVSWYQQFPGTAPKLLIYDNNKRPSGIPDRFSASKTGTSATLGITGPQTGDEADYYCGTWDSSLGAGVFGGGTKLTVL

SEQ ID NO: 2031 - protein, 8 aa, Homo sapiens
SSNIGNNY

SEQ ID NO: 2032 - skipped

SEQ ID NO: 2033 - protein, 11 aa, Homo sapiens
GTWDSSLGAGV

SEQ ID NO: 2034 - DNA, 351 bp, Homo sapiens
caaatgcagttggtgcagtctggggctgaggtgaagaagcctggggcctcagtgaagatttcctgcaagacatctggatacaccttcatcaactactatatggtctgggtgcgacaggcccctggacaaggacttgagtggatgggcataatcaatcctagtggtggtaatacggtctacgcacagaagttccagggcagagtcaccatgaccagggacacgtccacgaacacagtctatatggacctgagcagtctgagatctgaggacacggccgtctattattgtgcgagaactggtgatagggcttttgatgtctggggccacgggacaatggtcaccgtctcttca

SEQ ID NO: 2035 - protein, 117 aa, Homo sapiens
QMQLVQSGAEVKKPGASVKISCKTSGYTFINYYMVWVRQAPGQGLEWMGIINPSGGNTVYAQKFQGRVTMTRDTSTNTVYMDLSSLRSEDTAVYYCARTGDRAFDVWGHGTMVTVSS

SEQ ID NO: 2036 - protein, 8 aa, Homo sapiens
GYTFINYY

SEQ ID NO: 2037 - protein, 8 aa, Homo sapiens
INPSGGNT

SEQ ID NO: 2038 - protein, 10 aa, Homo sapiens
ARTGDRAFDV

SEQ ID NO: 2039 - DNA, 330 bp, Homo sapiens
cagtctgtgttgacgcagccgccctcagtgtctgcggccccaggacagaaggtcaccatctcctgctctggaagcagctccaacattgggaataattatgtttcctggtaccagcagttcccaggaacagcccccaaactcctcatttatgacaatcataggcgaccctcagggattcctgaccgattctctgcctccaagtctggcacgtcagccaccctgggcatcaccggactcctgactggggacgaggccgattattactgcggaacatgggatagcggcctgggtgctggggtgttcggcggagggaccaagctgaccgtccta

SEQ ID NO: 2040 - protein, 110 aa, Homo sapiens
QSVLTQPPSVSAAPGQKVTISCSGSSSNIGNNYVSWYQQFPGTAPKLLIYDNHRRPSGIPDRFSASKSGTSATLGITGLLTGDEADYYCGTWDSGLGAGVFGGGTKLTVL

SEQ ID NO: 2041 - protein, 8 aa, Homo sapiens
SSNIGNNY

SEQ ID NO: 2042 - skipped

SEQ ID NO: 2043 - protein, 11 aa, Homo sapiens
GTWDSGLGAGV

SEQ ID NO: 2044 - DNA, 351 bp, Homo sapiens
cagatgcaattggtgcagtctggggctgaggtgaagaagcctggggcctcagtgaagatttcctgcaagacatctggatacaccttcaccaattactatatggtctgggtgcgacaggcccctggacaaggacttgagtggatgggcataatcaaacctagtggtggtaacacgatctacgcacagaagttccagggcagagtcaccatgaccagggacacgtccacgaccacagtctatttggacctgaacagtctgagatctgaggacacggccgtgtattattgtgcgagaactggggatagggcttttgatgtctggggccacgggacaatggtcaccgtctcttca

SEQ ID NO: 2045 - protein, 117 aa, Homo sapiens
QMQLVQSGAEVKKPGASVKISCKTSGYTFTNYYMVWVRQAPGQGLEWMGIIKPSGGNTIYAQKFQGRVTMTRDTSTTTVYLDLNSLRSEDTAVYYCARTGDRAFDVWGHGTMVTVSS

SEQ ID NO: 2046 - protein, 8 aa, Homo sapiens
GYTFTNYY

SEQ ID NO: 2047 - protein, 8 aa, Homo sapiens
IKPSGGNT

SEQ ID NO: 2048 - protein, 10 aa, Homo sapiens
ARTGDRAFDV

SEQ ID NO: 2049 - DNA, 330 bp, Homo sapiens
cagtctgtgttgacgcagccgccctcagtgtctgcggccccaggacagaaggtcaccatctcctgctctggaaccagctccaacattgggaataattatgtttcctggtaccagcagttcccaggaacagcccccaaactcctcatttatgacaataataagcgaccctcagggattcctgaccgattctctggctccaagtctggcacgtcagccaccctgggcatcaccggactccagactggggacgaggccgattattactgcggaacatgggatagcagcctgggtgctggggtgttcggcggagggaccacgctgaccgtccta

SEQ ID NO: 2050 - protein, 110 aa, Homo sapiens
QSVLTQPPSVSAAPGQKVTISCSGTSSNIGNNYVSWYQQFPGTAPKLLIYDNNKRPSGIPDRFSGSKSGTSATLGITGLQTGDEADYYCGTWDSSLGAGVFGGGTTLTVL

SEQ ID NO: 2051 - protein, 8 aa, Homo sapiens
SSNIGNNY

SEQ ID NO: 2052 - skipped

SEQ ID NO: 2053 - protein, 11 aa, Homo sapiens
GTWDSSLGAGV

SEQ ID NO: 2054 - DNA, 351 bp, Homo sapiens
cagatacaactggtgcagtctggggctgaggtgaagaagcctggggcctcagtgaagttttcctgcaagacatctggatacaccttcaccaactactatatggtctgggtgcgacaggcccctggacaaggacttgagtggatgggcataatcaaacctagtggtggtaacacaatctacgcacagaacttccagggcagagtcaccatgaccagggacacgtccacgaacacagtctacatggacctgaggactctgagatctgaggacacggccgtttattattgtgcgagaactggtgatagggcttttgatgtctggggccaagggacaatggtcaccgtctcttca

SEQ ID NO: 2055 - protein, 117 aa, Homo sapiens
QIQLVQSGAEVKKPGASVKFSCKTSGYTFTNYYMVWVRQAPGQGLEWMGIIKPSGGNTIYAQNFQGRVTMTRDTSTNTVYMDLRTLRSEDTAVYYCARTGDRAFDVWGQGTMVTVSS

SEQ ID NO: 2056 - protein, 8 aa, Homo sapiens
GYTFTNYY

SEQ ID NO: 2057 - protein, 8 aa, Homo sapiens
IKPSGGNT

SEQ ID NO: 2058 - protein, 10 aa, Homo sapiens
ARTGDRAFDV

SEQ ID NO: 2059 - DNA, 330 bp, Homo sapiens
cagtctgtgttgacgcagccgccctcagtgtctgcggccccaggacagaaggtcaccatctcctgctctggaagcagctccaacattgggaataattttgtttcctggtaccagcagttcccaggaacagcccccaaactcctcatttatgacaataataagcgaccctcagggattcctgaccgattctctggctccaagtctggcacgtcagccaccctgggcatcaccggattccagactggggacgaggccgattattactgcggaacatgggatagcagcctgggtgctggggtgttcggcggagggaccaggctgaccgtccta

SEQ ID NO: 2060 - protein, 110 aa, Homo sapiens
QSVLTQPPSVSAAPGQKVTISCSGSSSNIGNNFVSWYQQFPGTAPKLLIYDNNKRPSGIPDRFSGSKSGTSATLGITGFQTGDEADYYCGTWDSSLGAGVFGGGTRLTVL

SEQ ID NO: 2061 - protein, 8 aa, Homo sapiens
SSNIGNNF

SEQ ID NO: 2062 - skipped

SEQ ID NO: 2063 - protein, 11 aa, Homo sapiens
GTWDSSLGAGV

SEQ ID NO: 2064 - DNA, 351 bp, Homo sapiens
cagatgcagctggtacagtctggggctgaggtgaagaagcctggggcctcagtgaagatttcctgcaagacatctggatacaccttcaccagctactatatggtctgggtgcgacaggcccctggacaaggacttgagtggatgggcataatcaaacctagtggtggtaacacaatctatgcacagaagttccagggcagagtcaacatgaccagggacacgtccacgaacacagtctatatggacctgagtagtctgagatctgaggacacggccgtgtattattgtgcgagaactggggatagggcttttgatgtctggggccaagggacaatggtcaccgtctcttca

SEQ ID NO: 2065 - protein, 117 aa, Homo sapiens
QMQLVQSGAEVKKPGASVKISCKTSGYTFTSYYMVWVRQAPGQGLEWMGIIKPSGGNTIYAQKFQGRVNMTRDTSTNTVYMDLSSLRSEDTAVYYCARTGDRAFDVWGQGTMVTVSS

SEQ ID NO: 2066 - protein, 8 aa, Homo sapiens
GYTFTSYY

SEQ ID NO: 2067 - protein, 8 aa, Homo sapiens
IKPSGGNT

SEQ ID NO: 2068 - protein, 10 aa, Homo sapiens
ARTGDRAFDV

SEQ ID NO: 2069 - DNA, 330 bp, Homo sapiens
cagtctgtgttgacgcagccgccctcagtgtctgcggccccaggacagaaggtcaccatctcctgctctggaagtacctccaacattgggactaattatgtctcctggtaccagcagctcccaggaacagcccccaaactcctcatttatgacaatagtaagcgcccctcagggattcctgaccgattctctggctccaagtctggcacgtcagccaccctgggcatcaccggactccagactggggacgaggccgattattactgcggaacatgggatagcagcctgggtgctggggtgttcggcggagggaccaaactgaccgtccta

SEQ ID NO: 2070 - protein, 110 aa, Homo sapiens
QSVLTQPPSVSAAPGQKVTISCSGSTSNIGTNYVSWYQQLPGTAPKLLIYDNSKRPSGIPDRFSGSKSGTSATLGITGLQTGDEADYYCGTWDSSLGAGVFGGGTKLTVL

SEQ ID NO: 2071 - protein, 8 aa, Homo sapiens
TSNIGTNY

SEQ ID NO: 2072 - skipped

SEQ ID NO: 2073 - protein, 11 aa, Homo sapiens
GTWDSSLGAGV

SEQ ID NO: 2074 - DNA, 351 bp, Homo sapiens
cagatgcaattggtgcagtctggggctgaggtgaagaagcctggggcctcagtgaagatttcctgcaagacatctggatacaccttcaccaactactatatggtctgggtgcgacaggcccctggacaaggacttgaatggatgggcataatcaaacctagtggtggtaacacgatctacgcacagaagttccagggcagagtcaccatgaccagggacacgtccacgaacacagtctatttggacctgaccagtctgagatctgaggacacggccgtgtattattgtgcgagaactggggatagggcttttgatgtctggggccacgggacaatggtcaccgtctcttca

SEQ ID NO: 2075 - protein, 117 aa, Homo sapiens
QMQLVQSGAEVKKPGASVKISCKTSGYTFTNYYMVWVRQAPGQGLEWMGIIKPSGGNTIYAQKFQGRVTMTRDTSTNTVYLDLTSLRSEDTAVYYCARTGDRAFDVWGHGTMVTVSS

SEQ ID NO: 2076 - protein, 8 aa, Homo sapiens
GYTFTNYY

SEQ ID NO: 2077 - protein, 8 aa, Homo sapiens
IKPSGGNT

SEQ ID NO: 2078 - protein, 10 aa, Homo sapiens
ARTGDRAFDV

SEQ ID NO: 2079 - DNA, 330 bp, Homo sapiens
cagtctgtgttgacgcagccgccctcagtgtctgcggccccaggacagaaggtcaccatctcctgctctggaagcagctccaacattggaaataattatgtttcctggtaccagcagttcccaggaacagcccccaaactcctcatttatgacaataataagcgaccctcagggattcctgaccgattctctggctccaagtctggcacgtcagccaccctgggcatcaccggactccagactggggacgaggccgattattactgcggaacatgggatagcagcctgggtgctggggtgttcggcggagggaccaagctgaccgtccta

SEQ ID NO: 2080 - protein, 110 aa, Homo sapiens; identical to SEQ ID NO: 1290

SEQ ID NO: 2081 - protein, 8 aa, Homo sapiens
SSNIGNNY

SEQ ID NO: 2082 - skipped

SEQ ID NO: 2083 - protein, 11 aa, Homo sapiens
GTWDSSLGAGV

SEQ ID NO: 2084 - DNA, 351 bp, Homo sapiens
cagatgcaattggtgcagtctgggactgaggtgaagaagcctggggcctcagtgaagatttcctgcaagacatctggatacaccttcaccaactactatatggtctgggtgcgacaggcccctggacaaggacttgagtggatgggcataatcaaacctggtggtggtaacacgatctacgcacagaaattccagggcagagtcaccatgaccagggacacgtccacgaacacagtctatttggacctgaacagtctgcgatctgaggacacggccgtgtattattgtgcgagaactggtgatagggcttttgatgtctggggccacgggacagtggtcaccgtctcttca

SEQ ID NO: 2085 - protein, 117 aa, Homo sapiens
QMQLVQSGTEVKKPGASVKISCKTSGYTFTNYYMVWVRQAPGQGLEWMGIIKPGGGNTIYAQKFQGRVTMTRDTSTNTVYLDLNSLRSEDTAVYYCARTGDRAFDVWGHGTVVTVSS

SEQ ID NO: 2086 - protein, 8 aa, Homo sapiens
GYTFTNYY

SEQ ID NO: 2087 - protein, 8 aa, Homo sapiens
IKPGGGNT

SEQ ID NO: 2088 - protein, 10 aa, Homo sapiens
ARTGDRAFDV

SEQ ID NO: 2089 - DNA, 330 bp, Homo sapiens
cagtctgtgttgacgcagccgccctcagtgtctgcggccccaggacagaaggtcaccatgtcctgctctggaagcagctccaacattgggaataattatgtttcctggtaccagcagttcccaggaacagcccccaaactcctcatctatgacaataataagcgaccctcagggattcctgaccgattctctggctccaagtctggcacgtcagccaccctgggcatcaccggactccagactggggacgaggccgattattactgcggaacatgggatagcagcctgggtgctggggtgttcggcggagggaccaagctgaccgtccta

SEQ ID NO: 2090 - protein, 110 aa, Homo sapiens
QSVLTQPPSVSAAPGQKVTMSCSGSSSNIGNNYVSWYQQFPGTAPKLLIYDNNKRPSGIPDRFSGSKSGTSATLGITGLQTGDEADYYCGTWDSSLGAGVFGGGTKLTVL

SEQ ID NO: 2091 - protein, 8 aa, Homo sapiens
SSNIGNNY

SEQ ID NO: 2092 - skipped

SEQ ID NO: 2093 - protein, 11 aa, Homo sapiens
GTWDSSLGAGV

SEQ ID NO: 2094 - DNA, 351 bp, Homo sapiens
cagattcagttggtgcagtctggggctgaggtgaagaagcctggggcctcagtgaagttttcctgcaagacatctggatacaccttcaccagctactatatggtctgggtgcgacaggcccctggacaaggacttgagtggatgggcataatcaaacctagtggtggtaacacaatctacgcacagaagttccagggcagagtcaccatgaccagggacacgtccacgaacacagtctacatggacctgagcagtctgagatctgaggacacggccgtgtatttttgtgcgagaactggggatagggcttttgatgtctggggccacgggacaatgatcaccgtctcttca

SEQ ID NO: 2095 - protein, 117 aa, Homo sapiens
QIQLVQSGAEVKKPGASVKFSCKTSGYTFTSYYMVWVRQAPGQGLEWMGIIKPSGGNTIYAQKFQGRVTMTRDTSTNTVYMDLSSLRSEDTAVYFCARTGDRAFDVWGHGTMITVSS

SEQ ID NO: 2096 - protein, 8 aa, Homo sapiens
GYTFTSYY

SEQ ID NO: 2097 - protein, 8 aa, Homo sapiens
IKPSGGNT

SEQ ID NO: 2098 - protein, 10 aa, Homo sapiens
ARTGDRAFDV

SEQ ID NO: 2099 - DNA, 330 bp, Homo sapiens; identical to SEQ ID NO: 1889

SEQ ID NO: 2100 - protein, 110 aa, Homo sapiens; identical to SEQ ID NO: 1240

SEQ ID NO: 2101 - protein, 8 aa, Homo sapiens
SSNIGNNF

SEQ ID NO: 2102 - skipped

SEQ ID NO: 2103 - protein, 11 aa, Homo sapiens
GTWDSSLGAGV

SEQ ID NO: 2104 - DNA, 351 bp, Homo sapiens
cagatgcaattggtgcagtctggggctgaggtgaagaagcctggggcctcagtgaagatctcctgcaagacatctggatacaccttcatcaactattatatggtctgggtgcgacaggccccgggacaaggacttgagtggatgggcataatcaaacccagtggtggtaacacgatctacgcacagaagttccagggcagagtcaccatgaccagggacacgtccacgaacacagtctatttggacctgagcagtctgagatctgaggacacggccgtgtattattgtgcgagaactggagatagggcttttgatgtctggggccacgggacaatggtcaccgtctcttca

SEQ ID NO: 2105 - protein, 117 aa, Homo sapiens
QMQLVQSGAEVKKPGASVKISCKTSGYTFINYYMVWVRQAPGQGLEWMGIIKPSGGNTIYAQKFQGRVTMTRDTSTNTVYLDLSSLRSEDTAVYYCARTGDRAFDVWGHGTMVTVSS

SEQ ID NO: 2106 - protein, 8 aa, Homo sapiens
GYTFINYY

SEQ ID NO: 2107 - protein, 8 aa, Homo sapiens
IKPSGGNT

SEQ ID NO: 2108 - protein, 10 aa, Homo sapiens
ARTGDRAFDV

SEQ ID NO: 2109 - DNA, 330 bp, Homo sapiens; identical to SEQ ID NO: 1519

SEQ ID NO: 2110 - protein, 110 aa, Homo sapiens; identical to SEQ ID NO: 1290

SEQ ID NO: 2111 - protein, 8 aa, Homo sapiens
SSNIGNNY

SEQ ID NO: 2112 - skipped

SEQ ID NO: 2113 - protein, 11 aa, Homo sapiens
GTWDSSLGAGV

SEQ ID NO: 2114 - DNA, 351 bp, Homo sapiens
cagatgcaattgctgcagtctggggctgaggtgaagaagcctggggcctcagcgaagatttcctgcaagacatctggatataccttcaccaactactatatggtctgggtgcgacaggctcctggacaaggacttgagtggatgggcataatcaaacctagtggtggtaacacgatctacgcacagaagtgccagggcagagtcaccatgaccagggacacgtccacgaacacagtctatttggacctgaacagtctgagatctgaggacacggccgtttattattgtgcgagaactggggatagggcttttgatttctggggccacgggacaatggtcaccgtctcttca

SEQ ID NO: 2115 - protein, 117 aa, Homo sapiens
QMQLLQSGAEVKKPGASAKISCKTSGYTFTNYYMVWVRQAPGQGLEWMGIIKPSGGNTIYAQKCQGRVTMTRDTSTNTVYLDLNSLRSEDTAVYYCARTGDRAFDFWGHGTMVTVSS

SEQ ID NO: 2116 - protein, 8 aa, Homo sapiens
GYTFTNYY

SEQ ID NO: 2117 - protein, 8 aa, Homo sapiens
IKPSGGNT

SEQ ID NO: 2118 - protein, 10 aa, Homo sapiens
ARTGDRAFDF

SEQ ID NO: 2119 - DNA, 330 bp, Homo sapiens
cagtctgtgttgacgcagccgccctcagtgtctgcggccccaggacagaaggtcaccatctcctgctctggaagcagctccaacattgggaataattatgtttcctggtatcaccagttcccaggaacagcccccaaactcctcatttatgacaataataagcgaccctcagggattcctgaccgattctctggctccaagtctggcacgtcagccaccctgggcatcaccggactccagactggggacgaggccgattattattgcggaacatgggatagcagcctgggtgctggggtgttcggcggagggaccaagctgaccgtccta

SEQ ID NO: 2120 - protein, 110 aa, Homo sapiens
QSVLTQPPSVSAAPGQKVTISCSGSSSNIGNNYVSWYHQFPGTAPKLLIYDNNKRPSGIPDRFSGSKSGTSATLGITGLQTGDEADYYCGTWDSSLGAGVFGGGTKLTVL

SEQ ID NO: 2121 - protein, 8 aa, Homo sapiens
SSNIGNNY

SEQ ID NO: 2122 - skipped

SEQ ID NO: 2123 - protein, 11 aa, Homo sapiens
GTWDSSLGAGV

SEQ ID NO: 2124 - DNA, 351 bp, Homo sapiens
cagattcagttggtgcagtctggggctgaggcgaagaagccaggggccccagtgaagttttctggcaagacatctggatacaacttcaccaactactacatggnctgtgtgcgacaggcccctgaacagggactttagtggatgggcataattaaacctagcggtggtaacacaatctccgcacagaagtaccagggcagagtcaccatgaccagggacacgtccacgaacacagtctacatggaccagaacagtctgagatctgaggacacggccgtctattattgtgcgagaactggagatagggcttttgatgtctggggccacgggacaatggtcaccgtgtcttca

SEQ ID NO: 2125 - protein, 117 aa, Homo sapiens
QIQLVQSGAEAKKPGAPVKFSGKTSGYNFTNYYMXCVRQAPEQGLXWMGIIKPSGGNTISAQKYQGRVTMTRDTSTNTVYMDQNSLRSEDTAVYYCARTGDRAFDVWGHGTMVTVSS

SEQ ID NO: 2126 - protein, 8 aa, Homo sapiens
GYNFTNYY

SEQ ID NO: 2127 - protein, 8 aa, Homo sapiens
IKPSGGNT

SEQ ID NO: 2128 - protein, 10 aa, Homo sapiens
ARTGDRAFDV

SEQ ID NO: 2129 - DNA, 330 bp, Homo sapiens
cagtctgtgttgacgcagccgccctcagtgtctgcggccccaggacagaaggtcaccatctcctgctctggaagcagctccaacattgggaataattatgtatcctggtaccagcagttcccaggaacagcccccaaactcctcatttatgacaataataagcgaccctcagggattcctgaccgattctctggctccaagtctggcacgtcagccaccctgggcatcaccgggctccagactggggacgaggccgattattactgcggaacatgggatagcagcctgggtgctggggtgttcggcggagggaccaaactgaccgtccta

SEQ ID NO: 2130 - protein, 110 aa, Homo sapiens; identical to SEQ ID NO: 1290

SEQ ID NO: 2131 - protein, 8 aa, Homo sapiens
SSNIGNNY

SEQ ID NO: 2132 - skipped

SEQ ID NO: 2133 - protein, 11 aa, Homo sapiens
GTWDSSLGAGV

SEQ ID NO: 2134 - DNA, 351 bp, Homo sapiens
cagatgcagctggtgcagtctggggctgaggtgaagaagcctggggcctcagtgaggttttcctgcaagacatctggatacaccttcaccagttactatatggtctgggtgcgacaggcccctggacaaggacttgaatggatgggcataatcaaacctagtggtggtaacacaatctacgcacagaagttccagggcagagtcaccatgaccagggacacgtccacgaatacagtctacatggacctgaggagtctgagctctgaggacacggccgtgtattattgtgcgagaactggggatagggcttttgatgtctggggccaagggacaatggtcaccgtctcttca

SEQ ID NO: 2135 - protein, 117 aa, Homo sapiens
QMQLVQSGAEVKKPGASVRFSCKTSGYTFTSYYMVWVRQAPGQGLEWMGIIKPSGGNTIYAQKFQGRVTMTRDTSTNTVYMDLRSLSSEDTAVYYCARTGDRAFDVWGQGTMVTVSS

SEQ ID NO: 2136 - protein, 8 aa, Homo sapiens
GYTFTSYY

SEQ ID NO: 2137 - protein, 8 aa, Homo sapiens
IKPSGGNT

SEQ ID NO: 2138 - protein, 10 aa, Homo sapiens
ARTGDRAFDV

SEQ ID NO: 2139 - DNA, 330 bp, Homo sapiens
cagtctgtgttgacgcagccgccctcagtgtctgcggtcccaggacagaaggtcaccatctcctgctctggaagcagctccaacattgggaataattttgtatcctggtacctgcagttcccaggaacagcccccaaactcctcatttatgacaataataagcgaccctcagggattcctgaccgattctctggctccaagtctgccacgtcagccaccctgggcatcaccggactccagactggggacgaggccgattattattgcggaacatgggacagcagcctgggtgctggggtgttcggcggagggacccagctgaccgtccta

SEQ ID NO: 2140 - protein, 110 aa, Homo sapiens
QSVLTQPPSVSAVPGQKVTISCSGSSSNIGNNFVSWYLQFPGTAPKLLIYDNNKRPSGIPDRFSGSKSATSATLGITGLQTGDEADYYCGTWDSSLGAGVFGGGTQLTVL

SEQ ID NO: 2141 - protein, 8 aa, Homo sapiens
SSNIGNNF

SEQ ID NO: 2142 - skipped

SEQ ID NO: 2143 - protein, 11 aa, Homo sapiens
GTWDSSLGAGV

SEQ ID NO: 2144 - DNA, 351 bp, Homo sapiens
cagattcagttggtgcagtctggggctgaggtgaagaagcctggggcctcagtgaagttttcctgcaagacatctggatacaccttcaccagctactatatggtctgggtgcgacaggcccctggacaaggacttgagtggatgggcataatcaaacctagtggtggtaacacaatctacgcacagaagttccagggcagagtcaccatgaccagggacacgtccacgaacacagtctacatggacctgaacagtctgagatctgaagacacggccgtgtattattgtgcgagaactggggatagggcttttgatgtctggggccacgggacaatgatcaccgtctcttca

SEQ ID NO: 2145 - protein, 117 aa, Homo sapiens
QIQLVQSGAEVKKPGASVKFSCKTSGYTFTSYYMVWVRQAPGQGLEWMGIIKPSGGNTIYAQKFQGRVTMTRDTSTNTVYMDLNSLRSEDTAVYYCARTGDRAFDVWGHGTMITVSS

SEQ ID NO: 2146 - protein, 8 aa, Homo sapiens
GYTFTSYY

SEQ ID NO: 2147 - protein, 8 aa, Homo sapiens
IKPSGGNT

SEQ ID NO: 2148 - protein, 10 aa, Homo sapiens
ARTGDRAFDV

SEQ ID NO: 2149 - DNA, 330 bp, Homo sapiens
cagtctgtgttgacgcagccgccctcagtgtctgcggccccaggacagaaggtcaccatctcctgctctggaagcagctccaacattgggaataattttgtatcctggtaccaacagtttccaggaacagcccccaaactcctcatttatgacaataataagcgaccctcagggattcctgaccgattctctggctccaagtctggcacgtcagccaccctgggcatcaccggactccagactggggacgaggccgattattactgcggaacatgggatagcagcctgggtgctggggtgttcggcggagggaccaagctgaccgtccta

SEQ ID NO: 2150 - protein, 110 aa, Homo sapiens; identical to SEQ ID NO: 1240

SEQ ID NO: 2151 - protein, 8 aa, Homo sapiens
SSNIGNNF

SEQ ID NO: 2152 - skipped

SEQ ID NO: 2153 - protein, 11 aa, Homo sapiens
GTWDSSLGAGV

SEQ ID NO: 2154 - DNA, 351 bp, Homo sapiens
cagattcagttggtgcagtctggggctgaggtgaagaagcctggggcctcagtgaagttttcctgcaagacatctggatacaccttcaccaactactatatggtctgggtgcgacaggcccctggacaaggacttgagtggatgggcataatcaaacctagtggtggtaacacaatctacgcacagaagttccagggcagagtcaccatgaccagggacacgtccacgaacacagtctacatggacctgaacagtctgagatctgaggacacggccgtctattattgtgcgagaactggagatagggcttttgatgtctggggccacgggacaatggtcaccgtgtcttca

SEQ ID NO: 2155 - protein, 117 aa, Homo sapiens
QIQLVQSGAEVKKPGASVKFSCKTSGYTFTNYYMVWVRQAPGQGLEWMGIIKPSGGNTIYAQKFQGRVTMTRDTSTNTVYMDLNSLRSEDTAVYYCARTGDRAFDVWGHGTMVTVSS

SEQ ID NO: 2156 - protein, 8 aa, Homo sapiens
GYTFTNYY

SEQ ID NO: 2157 - protein, 8 aa, Homo sapiens
IKPSGGNT

SEQ ID NO: 2158 - protein, 10 aa, Homo sapiens
ARTGDRAFDV

SEQ ID NO: 2159 - DNA, 330 bp, Homo sapiens; identical to SEQ ID NO: 1289

SEQ ID NO: 2160 - protein, 110 aa, Homo sapiens; identical to SEQ ID NO: 1290

SEQ ID NO: 2161 - protein, 8 aa, Homo sapiens
SSNIGNNY

SEQ ID NO: 2162 - skipped

SEQ ID NO: 2163 - protein, 11 aa, Homo sapiens
GTWDSSLGAGV

SEQ ID NO: 2164 - DNA, 351 bp, Homo sapiens
cagatgaagttggtgcagtctggggctgaggtgaagaagcctggggcctcagtgaagatttcctgtaagacatctggatacaccttcatcaactactatatggtctgggtgcgacaggcccctggacaaggacttgagtggatgggcataatcaaacctagtggtggtaatacgatctacgcacagaagttccagggcagagtcaccatgaccagggacacgtccacgaacacagtctatatggacctgagcagtctgagatctgaggacacggccgtgtattattgtgcgagaactggagatagggcttttgatgtctggggccacgggacaatggtcaccgtctcttca

SEQ ID NO: 2165 - protein, 117 aa, Homo sapiens
QMKLVQSGAEVKKPGASVKISCKTSGYTFINYYMVWVRQAPGQGLEWMGIIKPSGGNTIYAQKFQGRVTMTRDTSTNTVYMDLSSLRSEDTAVYYCARTGDRAFDVWGHGTMVTVSS

SEQ ID NO: 2166 - protein, 8 aa, Homo sapiens
GYTFINYY

SEQ ID NO: 2167 - protein, 8 aa, Homo sapiens
IKPSGGNT

SEQ ID NO: 2168 - protein, 10 aa, Homo sapiens
ARTGDRAFDV

SEQ ID NO: 2169 - DNA, 330 bp, Homo sapiens
cagtctgtgttgacgcagccgccctcagtgtctgcggccccaggacagaaggtcaccatctcctgctctggaagcaactccaacattgggaataattatgtttcctggtaccagcagttcccaggaacagcccccaaactcctcatttatgacaatcataagcgaccctcagggattcctgaccgattctctgcctccaagtctggcacgtcagccaccctgggcatcaccggactccagactggggacgaggccgattattactgcggaacatgggatagcggcctgggtgctggggtgttcggcggagggaccaagctgaccgtccta

SEQ ID NO: 2170 - protein, 110 aa, Homo sapiens
QSVLTQPPSVSAAPGQKVTISCSGSNSNIGNNYVSWYQQFPGTAPKLLIYDNHKRPSGIPDRFSASKSGTSATLGITGLQTGDEADYYCGTWDSGLGAGVFGGGTKLTVL

SEQ ID NO: 2171 - protein, 8 aa, Homo sapiens
NSNIGNNY

SEQ ID NO: 2172 - skipped

SEQ ID NO: 2173 - protein, 11 aa, Homo sapiens
GTWDSGLGAGV

SEQ ID NO: 2174 - DNA, 351 bp, Homo sapiens
cagatgcagttggtgcagtctggggctgaggtgaagaagcctggggcctcagtgaagttttcctgcaagacatctggatacaccttcaccaattattatatggtctgggtgcgacaggcccctggacaaggacttgaatggatgggcataatcaaacctagtggtggtaacacaatctacgcacagaagttccagggcagagtcaccatgaccagggacacgtccacgaatacagtctatatggacctgaggagtctgagatctgaggacacggccgtgtattattgtgcgagaactggggatagggcttttgatgtctggggccaagggacaatggtcaccgtctcttca

SEQ ID NO: 2175 - protein, 117 aa, Homo sapiens
QMQLVQSGAEVKKPGASVKFSCKTSGYTFTNYYMVWVRQAPGQGLEWMGIIKPSGGNTIYAQKFQGRVTMTRDTSTNTVYMDLRSLRSEDTAVYYCARTGDRAFDVWGQGTMVTVSS

SEQ ID NO: 2176 - protein, 8 aa, Homo sapiens
GYTFTNYY

SEQ ID NO: 2177 - protein, 8 aa, Homo sapiens
IKPSGGNT

SEQ ID NO: 2178 - protein, 10 aa, Homo sapiens
ARTGDRAFDV

SEQ ID NO: 2179 - DNA, 330 bp, Homo sapiens
cagtctgtgttgacgcagccgccctcagtgtctgcggccccaggacagaaggtcaccatctcctgctctggaagcagttccaatattgggaataattttgtatcctggtacctgcagttcccaggaacagcccccaaactcctcatttatgacaataataagcgaccctcagggattcctgaccgattctctggctccaagtctggcacgtcagccaccctgggcatcaccggactccagactggggacgaggccgattattactgcggaacatgggatagcagcctgggtgctggggtgttcggcggagggacccagctgaccgtccta

SEQ ID NO: 2180 - protein, 110 aa, Homo sapiens; identical to SEQ ID NO: 1930

SEQ ID NO: 2181 - protein, 8 aa, Homo sapiens
SSNIGNNF

SEQ ID NO: 2182 - skipped

SEQ ID NO: 2183 - protein, 11 aa, Homo sapiens
GTWDSSLGAGV

SEQ ID NO: 2184 - DNA, 351 bp, Homo sapiens
cagatgcagctggtgcagtctggggctgaggtgaagaagcctggggcctcagtgaagttttcctgcaagacatctggatacaccttcaccagctactatatggtctgggtgcgacaggcccctggacaaggacttgagtggatgggcataatcaaacctagtggtggtaacacaatctatgcacggaagttccagggcagagtcaccatgaccagggacacgtccacgaacacagtctacatggacctgagcagtctgagatctgaggacacggccgtgtattattgtgcgagaactggggatagggcttttgatgtctggggccaagggacattggtcaccgtctcttca

SEQ ID NO: 2185 - protein, 117 aa, Homo sapiens
QMQLVQSGAEVKKPGASVKFSCKTSGYTFTSYYMVWVRQAPGQGLEWMGIIKPSGGNTIYARKFQGRVTMTRDTSTNTVYMDLSSLRSEDTAVYYCARTGDRAFDVWGQGTLVTVSS

SEQ ID NO: 2186 - protein, 8 aa, Homo sapiens
GYTFTSYY

SEQ ID NO: 2187 - protein, 8 aa, Homo sapiens
IKPSGGNT

SEQ ID NO: 2188 - protein, 10 aa, Homo sapiens
ARTGDRAFDV

SEQ ID NO: 2189 - DNA, 330 bp, Homo sapiens
cagtctgtgttgacgcagccgccctcagtgtctgcggccccaggacagaaggtcaccatctcctgctctggaagcagctccaacattgggagtaattatgtctcctggtaccagcagctcccaggaacagcccccaaactcctcatttatgacaataataagcgcccctcagggattcctgaccgattctctggctccaagtctggcacgtcagccaccctgggcatcaccggactccagactggggacgaggccgattattactgcggaacatgggatagcagcctgggtgctggggtgttcggcggagggaccaaactgaccgtccta

SEQ ID NO: 2190 - protein, 110 aa, Homo sapiens
QSVLTQPPSVSAAPGQKVTISCSGSSSNIGSNYVSWYQQLPGTAPKLLIYDNNKRPSGIPDRFSGSKSGTSATLGITGLQTGDEADYYCGTWDSSLGAGVFGGGTKLTVL

SEQ ID NO: 2191 - protein, 8 aa, Homo sapiens
SSNIGSNY

SEQ ID NO: 2192 - skipped

SEQ ID NO: 2193 - protein, 11 aa, Homo sapiens
GTWDSSLGAGV

SEQ ID NO: 2194 - DNA, 351 bp, Homo sapiens
cagatacaactggtgcagtctggggctgaggtgaagaagcctggggcctcagtgaagttttcctgcaagacatctggatacaccttcaccaactactatatggtctgggtgcgacaggcccctggacaaggtcttgagtggatgggcataatcaaacctagtggtggtaacacaatctacgcacagaacttccagggcagagtcaccatgaccagggacacgtccacgaacacagtctacatggacctgaggagtctgagatctggggacacggccgtgtattattgtgcgagaagtggtgatagggcttttgatgtctggggccaagggacaatggtcaccgtctcttca

SEQ ID NO: 2195 - protein, 117 aa, Homo sapiens
QIQLVQSGAEVKKPGASVKFSCKTSGYTFTNYYMVWVRQAPGQGLEWMGIIKPSGGNTIYAQNFQGRVTMTRDTSTNTVYMDLRSLRSGDTAVYYCARSGDRAFDVWGQGTMVTVSS

SEQ ID NO: 2196 - protein, 8 aa, Homo sapiens
GYTFTNYY

SEQ ID NO: 2197 - protein, 8 aa, Homo sapiens
IKPSGGNT

SEQ ID NO: 2198 - protein, 10 aa, Homo sapiens
ARSGDRAFDV

SEQ ID NO: 2199 - DNA, 330 bp, Homo sapiens; identical to SEQ ID NO: 1299

SEQ ID NO: 2200 - protein, 110 aa, Homo sapiens; identical to SEQ ID NO: 1240

SEQ ID NO: 2201 - protein, 8 aa, Homo sapiens
SSNIGNNF

SEQ ID NO: 2202 - skipped

SEQ ID NO: 2203 - protein, 11 aa, Homo sapiens
GTWDSSLGAGV

SEQ ID NO: 2204 - DNA, 351 bp, Homo sapiens
cagatacagctggtgcagtctggggctgaggtgaagaagcctggggcctcagtgaggctttcctgcaagacatctggatacaccttcaccaactactatatggtctgggtgcgacaggcccctggacaaggacttgagtggatgggcataatcaaaccgagtggtggtaatacaatctacgcacagaacttccagggcagagtcaccatgaccagggacacgtccacgagaacagtctacatggacctgaggagtctgagatctgaggacacggccgtgtattattgtgcgagaactggtgatagggcttttgatgtctggggccaagggacaatggtcaccgtctcttta

SEQ ID NO: 2205 - protein, 117 aa, Homo sapiens
QIQLVQSGAEVKKPGASVRLSCKTSGYTFTNYYMVWVRQAPGQGLEWMGIIKPSGGNTIYAQNFQGRVTMTRDTSTRTVYMDLRSLRSEDTAVYYCARTGDRAFDVWGQGTMVTVSL

SEQ ID NO: 2206 - protein, 8 aa, Homo sapiens
GYTFTNYY

SEQ ID NO: 2207 - protein, 8 aa, Homo sapiens
IKPSGGNT

SEQ ID NO: 2208 - protein, 10 aa, Homo sapiens
ARTGDRAFDV

SEQ ID NO: 2209 - DNA, 330 bp, Homo sapiens
cagtctgtgttgacgcagccgccctcagtgtctgcggccccaggacagaaggtcaccatctcctgctctggaagcagctccaacattgggaataattttgtatcctggtaccagcagttcccaggaacagcccccaaactcctcatttatgacaataataagcgaccctcagggattcctgaccgattctctggctccaagtctggcacgtcagccaccctgggcatcaccggactccagactggggacgaggccgaatattactgcggaacatgggatagcagcctgggtgctggggtgttcggcggagggaccaagctgaccgtccta

SEQ ID NO: 2210 - protein, 110 aa, Homo sapiens
QSVLTQPPSVSAAPGQKVTISCSGSSSNIGNNFVSWYQQFPGTAPKLLIYDNNKRPSGIPDRFSGSKSGTSATLGITGLQTGDEAEYYCGTWDSSLGAGVFGGGTKLTVL

SEQ ID NO: 2211 - protein, 8 aa, Homo sapiens
SSNIGNNF

SEQ ID NO: 2212 - skipped

SEQ ID NO: 2213 - protein, 11 aa, Homo sapiens
GTWDSSLGAGV

SEQ ID NO: 2214 - DNA, 351 bp, Homo sapiens
cagatgcaattggtgcagtctggggctgaggtgaagaagcctggggcctcagtgaagatttcctgcaagacatctggatacaccttcaccaactattatatggtctgggtgcgacaggcccctggacaaggacttgagtggatgggcataatcaaacctagtggtggtaacacgatctacgcacagaagttccagggcagagtcaccatgaccagggacacgtccacgaacacagtctatttggacctgagcagtctgagatctgaggacacggccgtgtattattgtgcgagaactggtgatagggcttttgatgtctggggccacgggacagtggtcaccgtctcttca

SEQ ID NO: 2215 - protein, 117 aa, Homo sapiens
QMQLVQSGAEVKKPGASVKISCKTSGYTFTNYYMVWVRQAPGQGLEWMGIIKPSGGNTIYAQKFQGRVTMTRDTSTNTVYLDLSSLRSEDTAVYYCARTGDRAFDVWGHGTVVTVSS

SEQ ID NO: 2216 - protein, 8 aa, Homo sapiens
GYTFTNYY

SEQ ID NO: 2217 - protein, 8 aa, Homo sapiens
IKPSGGNT

SEQ ID NO: 2218 - protein, 10 aa, Homo sapiens
ARTGDRAFDV

SEQ ID NO: 2219 - DNA, 330 bp, Homo sapiens
cagtctgtgttgacgcagccgccctcagtgtctgcggccccaggacagaaggtcaccatctcctgctctggaagcagctccaacattgggaataattatgtttcctggtaccagcagttcccaggaacagcccccaaactcctcatctatgacaataataagcgaccctcagggattcctgaccgattctctggctccaagtctggcacgtcagccaccctggccatcaccggactccagactggggacgaggccgattattactgcggaacatgggatagcagcctgggtgttggggtgttcggcggagggaccaaactgaccgtccta

SEQ ID NO: 2220 - protein, 110 aa, Homo sapiens
QSVLTQPPSVSAAPGQKVTISCSGSSSNIGNNYVSWYQQFPGTAPKLLIYDNNKRPSGIPDRFSGSKSGTSATLAITGLQTGDEADYYCGTWDSSLGVGVFGGGTKLTVL

SEQ ID NO: 2221 - protein, 8 aa, Homo sapiens
SSNIGNNY

SEQ ID NO: 2222 - skipped

SEQ ID NO: 2223 - protein, 11 aa, Homo sapiens
GTWDSSLGVGV

SEQ ID NO: 2224 - DNA, 351 bp, Homo sapiens
cagatgcagctggtacagtctggggctgaggtgaagaagcctggggcctcagtgaagttttcctgcaagacatctggatacaccttcaccagctattatatggtctgggtgcgacaggcccctggacaaggacttgagtggatgggcataatcaaacctagtggtggtaacacaatctatgcacagaagttccagggcagagtcaccatgaccagggacacgtccacgaacacagtctacatggacctgagtagtctgagatctgaggacacggccgtgtattattgtgcgagaactggggatagggcttttgatgtctggggccaagggacaatggtcaccgtctcttca

SEQ ID NO: 2225 - protein, 117 aa, Homo sapiens
QMQLVQSGAEVKKPGASVKFSCKTSGYTFTSYYMVWVRQAPGQGLEWMGIIKPSGGNTIYAQKFQGRVTMTRDTSTNTVYMDLSSLRSEDTAVYYCARTGDRAFDVWGQGTMVTVSS

SEQ ID NO: 2226 - protein, 8 aa, Homo sapiens
GYTFTSYY

SEQ ID NO: 2227 - protein, 8 aa, Homo sapiens
IKPSGGNT

SEQ ID NO: 2228 - protein, 10 aa, Homo sapiens
ARTGDRAFDV

SEQ ID NO: 2229 - DNA, 330 bp, Homo sapiens
cagtctgtgttgacgcagccgccctcagtgtctgcggccccaggacagaaggtcaccatctcctgctctggaagcacctccaacattgggagtaattatgtctcctggtaccagcagctcccaggaacagcccccaaactcctcatttatgacaataataagcgcccctcagggattcctgaccgattctctggctccaagtctggcacgtcagccaccctgggcatcaccggactccagactggggacgaggccgattattactgcggaacatgggatagcagcctgggtgctggggtgttcggcggagggaccaaactgaccgtccta

SEQ ID NO: 2230 - protein, 110 aa, Homo sapiens
QSVLTQPPSVSAAPGQKVTISCSGSTSNIGSNYVSWYQQLPGTAPKLLIYDNNKRPSGIPDRFSGSKSGTSATLGITGLQTGDEADYYCGTWDSSLGAGVFGGGTKLTVL

SEQ ID NO: 2231 - protein, 8 aa, Homo sapiens
TSNIGSNY

SEQ ID NO: 2232 - skipped

SEQ ID NO: 2233 - protein, 11 aa, Homo sapiens
GTWDSSLGAGV

SEQ ID NO: 2234 - DNA, 351 bp, Homo sapiens
cagatacagctggtgcagtctggggctgaggtgaagaagcctggggcctcagtgaagttttcctgcaagacatctggatacaccttcaccaactactatatggtctgggtgcgacaggcccctgggcaaggacttgagtggatgggcataatcaaacctagcggtggtaacacaatctacgcacagaacttccagggcagagtcaccatgaccagggacacgtccacgaacacagtctacatggacctgaggagtctgagatctgaggacacggccgtgtattattgtgcgagaactggcgatagggcttttgatgtctggggccaagggacaatggtcaccgtctcttca

SEQ ID NO: 2235 - protein, 117 aa, Homo sapiens; identical to SEQ ID NO: 1405

SEQ ID NO: 2236 - protein, 8 aa, Homo sapiens
GYTFTNYY

SEQ ID NO: 2237 - protein, 8 aa, Homo sapiens
IKPSGGNT

SEQ ID NO: 2238 - protein, 10 aa, Homo sapiens
ARTGDRAFDV

SEQ ID NO: 2239 - DNA, 330 bp, Homo sapiens; identical to SEQ ID NO: 1299

SEQ ID NO: 2240 - protein, 110 aa, Homo sapiens; identical to SEQ ID NO: 1240

SEQ ID NO: 2241 - protein, 8 aa, Homo sapiens
SSNIGNNF

SEQ ID NO: 2242 - skipped

SEQ ID NO: 2243 - protein, 11 aa, Homo sapiens
GTWDSSLGAGV

SEQ ID NO: 2244 - DNA, 351 bp, Homo sapiens
cagatacaactggtgcagtctggggctgaggtgaagaagcctggggcctcagtgaagttttcctgcaagacatctggatacaccttcaccaactactatatggtgtgggtgcgacaggcccctggacaaggacttgagtggatgggcataatcaaacctagtggtggtaacacaatctacgcacagaacttccagggcagagtcaccatgaccagggacacgtccacgaacacagtgtacttggacctgaggagtctgagatctgaggacacggccgtgtattattgtgcgagaactggtgatagggcttttgatgtctggggccaagggacaatggtcaccgtctcttca

SEQ ID NO: 2245 - protein, 117 aa, Homo sapiens
QIQLVQSGAEVKKPGASVKFSCKTSGYTFTNYYMVWVRQAPGQGLEWMGIIKPSGGNTIYAQNFQGRVTMTRDTSTNTVYLDLRSLRSEDTAVYYCARTGDRAFDVWGQGTMVTVSS

SEQ ID NO: 2246 - protein, 8 aa, Homo sapiens
GYTFTNYY

SEQ ID NO: 2247 - protein, 8 aa, Homo sapiens
IKPSGGNT

SEQ ID NO: 2248 - protein, 10 aa, Homo sapiens
ARTGDRAFDV

SEQ ID NO: 2249 - DNA, 330 bp, Homo sapiens; identical to SEQ ID NO: 1299

SEQ ID NO: 2250 - protein, 110 aa, Homo sapiens; identical to SEQ ID NO: 1240

SEQ ID NO: 2251 - protein, 8 aa, Homo sapiens
SSNIGNNF

SEQ ID NO: 2252 - skipped

SEQ ID NO: 2253 - protein, 11 aa, Homo sapiens
GTWDSSLGAGV

SEQ ID NO: 2254 - DNA, 351 bp, Homo sapiens
cagatgcaattgctgcagtctggggctgaggtgaagaagcctggggcctcagtgaagatttcctgcaagacatctggatacaccttcaccaactactatatggtctgggtgcgacaggcccctggacaaggacttaagtggatgggcataatcaaacctagtggtggtaacacgatctacgcacagaacttccagggcagagtcaccatgaccagggacacgtccacaaacacaatctatttggacctgagcagtctgagatctgaggacacggccgtatattattgtgcgagaactggggatagggcttttgatgtctggggccacgggacaatggtcaccgtctcttca

SEQ ID NO: 2255 - protein, 117 aa, Homo sapiens
QMQLLQSGAEVKKPGASVKISCKTSGYTFTNYYMVWVRQAPGQGLKWMGIIKPSGGNTIYAQNFQGRVTMTRDTSTNTIYLDLSSLRSEDTAVYYCARTGDRAFDVWGHGTMVTVSS

SEQ ID NO: 2256 - protein, 8 aa, Homo sapiens
GYTFTNYY

SEQ ID NO: 2257 - protein, 8 aa, Homo sapiens
IKPSGGNT

SEQ ID NO: 2258 - protein, 10 aa, Homo sapiens
ARTGDRAFDV

SEQ ID NO: 2259 - DNA, 330 bp, Homo sapiens
cagtctgtgttgacgcagccgccctcagtgtctgcggccccaggacagaaggtcaccatctcctgctctggaagcagctccaacattgggaataattatgtttcctggtatcagcagttcccaggaacagcccccaaactcctcatttatgacaataataagcgaccctcagggattcctgaccgattctctggctccaagtctggcacgtcagccaccctgggcatcaccggactccagactggggacgaggccgattattattgcggaacatgggatagcagcctgggtgctggggtgttcggcggagggaccaaactgaccgtccta

SEQ ID NO: 2260 - protein, 110 aa, Homo sapiens; identical to SEQ ID NO: 1290

SEQ ID NO: 2261 - protein, 8 aa, Homo sapiens
SSNIGNNY

SEQ ID NO: 2262 - skipped

SEQ ID NO: 2263 - protein, 11 aa, Homo sapiens
GTWDSSLGAGV

SEQ ID NO: 2264 - DNA, 351 bp, Homo sapiens
cagatgcagttggtgcagtctggggctgaggtgaagaagcctggggcctcagtgaagatttcctgcaagacatctggatacaccttcaccaattactatatggtctgggtgcgacaggcccctggacaaggacttgagtggatgggcataatcaaacctagtggtggtaacacgatctacgcacagaagttccagggcagagtcaccatgaccagggacacgtccacgaacacagtctatatggacctgaacagtctgagatctgaggacacggccgtatattattgtgcgagaactggggatagggcttttgatgtctggggccacgggacaatggtcaccgtctcttca

SEQ ID NO: 2265 - protein, 117 aa, Homo sapiens
QMQLVQSGAEVKKPGASVKISCKTSGYTFTNYYMVWVRQAPGQGLEWMGIIKPSGGNTIYAQKFQGRVTMTRDTSTNTVYMDLNSLRSEDTAVYYCARTGDRAFDVWGHGTMVTVSS

SEQ ID NO: 2266 - protein, 8 aa, Homo sapiens
GYTFTNYY

SEQ ID NO: 2267 - protein, 8 aa, Homo sapiens
IKPSGGNT

SEQ ID NO: 2268 - protein, 10 aa, Homo sapiens
ARTGDRAFDV

SEQ ID NO: 2269 - DNA, 330 bp, Homo sapiens
cagtctgtgttgacgcagccgccctcagtgtctgcggccccaggacagaaggtcaccatctcctgctctggaagcagctccaatattggaactaattctctttcctggtaccagcagttcccaggaacagcccccaaactcctcatttatgacaataataaacgaccctcagggattcctgaccgattctctggctccaagtctggcacgtcagccaccctgggcatcaccggactccagactggggacgaggccgattattactgcggaacatgggatagcagcctgggtgctggggtgttcggcggagggaccaaggtgaccgtccta

SEQ ID NO: 2270 - protein, 110 aa, Homo sapiens
QSVLTQPPSVSAAPGQKVTISCSGSSSNIGTNSLSWYQQFPGTAPKLLIYDNNKRPSGIPDRFSGSKSGTSATLGITGLQTGDEADYYCGTWDSSLGAGVFGGGTKVTVL

SEQ ID NO: 2271 - protein, 8 aa, Homo sapiens
SSNIGTNS

SEQ ID NO: 2272 - skipped

SEQ ID NO: 2273 - protein, 11 aa, Homo sapiens
GTWDSSLGAGV

SEQ ID NO: 2274 - DNA, 351 bp, Homo sapiens
cagattcagttggtgcagtctggggctgaggtgaagaagcctggggcctcagtgaagttttcctgcaagacatctggatacaccttcaccggctactatatggtctgggtgcgacaggcccctggacaaggacttgagtggatgggcataatcaaacctagtggtggtgacacaatctacgcacagaagttccagggcagagtcaccatgaccagggacacgtccacgaacacagtctacatggacctgaacagtctgagatctgaggacacggccgtctattattgtgcgagaactggagatagggcttttgatgtctggggccacgggacaatggtcaccgtgtcttca

SEQ ID NO: 2275 - protein, 117 aa, Homo sapiens
QIQLVQSGAEVKKPGASVKFSCKTSGYTFTGYYMVWVRQAPGQGLEWMGIIKPSGGDTIYAQKFQGRVTMTRDTSTNTVYMDLNSLRSEDTAVYYCARTGDRAFDVWGHGTMVTVSS

SEQ ID NO: 2276 - protein, 8 aa, Homo sapiens
GYTFTGYY

SEQ ID NO: 2277 - protein, 8 aa, Homo sapiens
IKPSGGDT

SEQ ID NO: 2278 - protein, 10 aa, Homo sapiens
ARTGDRAFDV

SEQ ID NO: 2279 - DNA, 330 bp, Homo sapiens
cagtctgtgttgacgcagccgccctcagtgtctgcggccccaggacagaaggtcaccatctcctgctctggaagcaactccaacattgggaataattatgtatcctggtaccagcagttcccaggaacagcccccaaactcctcatttatgacaataataagcgaccctcagggattcctgaccgattctctggctccaagtctggcacgtcagccaccctgggcatcaccggactccagactggggacgaggccgattattactgcggaacatgggatagcagcctgggtgctggggtgttcggcggagggaccaaactgaccgtccta

SEQ ID NO: 2280 - protein, 110 aa, Homo sapiens
QSVLTQPPSVSAAPGQKVTISCSGSNSNIGNNYVSWYQQFPGTAPKLLIYDNNKRPSGIPDRFSGSKSGTSATLGITGLQTGDEADYYCGTWDSSLGAGVFGGGTKLTVL

SEQ ID NO: 2281 - protein, 8 aa, Homo sapiens
NSNIGNNY

SEQ ID NO: 2282 - skipped

SEQ ID NO: 2283 - protein, 11 aa, Homo sapiens
GTWDSSLGAGV

SEQ ID NO: 2284 - DNA, 351 bp, Homo sapiens
cagatacagctggtgcagtctggggctgaggtgaagaagcctggggcctcagtgaagttttcctgcaagacatctggatacaccttcaccaactactatatggtctgggtgcgacaggcccctggacaaggacttgagtggatgggcataatcaaacctagtggtggtaacacaatctacgcacagagtttccagggcagagtcaccatgaccagggacacgtccacgaacacagtctacatggacctgaggagtctgagatctgaggacacggccgtgtattattgtgcgagaactggtgatagggcttttgatgtctggggccaagggacaatggtcaccgtctcttca

SEQ ID NO: 2285 - protein, 117 aa, Homo sapiens
QIQLVQSGAEVKKPGASVKFSCKTSGYTFTNYYMVWVRQAPGQGLEWMGIIKPSGGNTIYAQSFQGRVTMTRDTSTNTVYMDLRSLRSEDTAVYYCARTGDRAFDVWGQGTMVTVSS

SEQ ID NO: 2286 - protein, 8 aa, Homo sapiens
GYTFTNYY

SEQ ID NO: 2287 - protein, 8 aa, Homo sapiens
IKPSGGNT

SEQ ID NO: 2288 - protein, 10 aa, Homo sapiens
ARTGDRAFDV

SEQ ID NO: 2289 - DNA, 330 bp, Homo sapiens; identical to SEQ ID NO: 1299

SEQ ID NO: 2290 - protein, 110 aa, Homo sapiens; identical to SEQ ID NO: 1240

SEQ ID NO: 2291 - protein, 8 aa, Homo sapiens
SSNIGNNF

SEQ ID NO: 2292 - skipped

SEQ ID NO: 2293 - protein, 11 aa, Homo sapiens
GTWDSSLGAGV

SEQ ID NO: 2294 - DNA, 351 bp, Homo sapiens
cagatacagctggtgcagtctggggctgaggtgaagaagcctggggcctcagtgaggttttcctgcaagacatctggatacaccttcaccaactactatatggtctgggtgcgacaggcccctggacaagggcttgagtggatgggcataatcaaacctagtggtggtgacacaatctacgcacagaacttccagggcagagtcaccatgaccagggacacgtccacgaactcagtctacatggacctgaggagtctgagatctgaggacacggccgtgtattattgtgcgagaactggtgatagggcttttgatgtctggggccaagggacaatggtcaccgtctcttca

SEQ ID NO: 2295 - protein, 117 aa, Homo sapiens; identical to SEQ ID NO: 1805

SEQ ID NO: 2296 - protein, 8 aa, Homo sapiens
GYTFTNYY

SEQ ID NO: 2297 - protein, 8 aa, Homo sapiens
IKPSGGDT

SEQ ID NO: 2298 - protein, 10 aa, Homo sapiens
ARTGDRAFDV

SEQ ID NO: 2299 - DNA, 330 bp, Homo sapiens
cagtctgtgttgacgcagccgccctcagtgtctgcggccccaggacagaaggtcaccatctcctgctctggacgcagctccaacattgggaataattttgtatcctggtaccaacagttcccaggaacagcccccaaactcctcatttatgacaataataaacgaccctcagggattcctgaccgattctctggctccaagtctggcacgtcagccaccctgggcatcaccggactccagactggggacgaggccgattattactgcggaacatgggatagcagcctgggtactggggtgttcggcggagggaccaagctgaccgtccta

SEQ ID NO: 2300 - protein, 110 aa, Homo sapiens
QSVLTQPPSVSAAPGQKVTISCSGRSSNIGNNFVSWYQQFPGTAPKLLIYDNNKRPSGIPDRFSGSKSGTSATLGITGLQTGDEADYYCGTWDSSLGTGVFGGGTKLTVL

SEQ ID NO: 2301 - protein, 8 aa, Homo sapiens
SSNIGNNF

SEQ ID NO: 2302 - skipped

SEQ ID NO: 2303 - protein, 11 aa, Homo sapiens
GTWDSSLGTGV

SEQ ID NO: 2304 - DNA, 387 bp, Homo sapiens
caggtccacctgatacaatctggggctgaggtgaagaagcctggggcctcagtgaaggtctcctgcaaggtttccggatacaccctcattgaagtatccgtgcactgggtgcgacaggctcctggaaaagggcttgagtggatgggaggttttgatcctgaagcagctgaaacaatctacgcacagaaattccagggcagagtcaccatgaccgaggacacatctacagacacagcctacatggacctgagcagcctgaaatctgaagactcggccgtatattactgtgcaataggaccagcagtgactggtagaaactccggggaatactattactattacggtatggacgtctggggccaagggaccacggtcaccgtcgcctca

SEQ ID NO: 2305 - protein, 129 aa, Homo sapiens
QVHLIQSGAEVKKPGASVKVSCKVSGYTLIEVSVHWVRQAPGKGLEWMGGFDPEAAETIYAQKFQGRVTMTEDTSTDTAYMDLSSLKSEDSAVYYCAIGPAVTGRNSGEYYYYYGMDVWGQGTTVTVAS

SEQ ID NO: 2306 - protein, 8 aa, Homo sapiens
GYTLIEVS

SEQ ID NO: 2307 - protein, 8 aa, Homo sapiens
FDPEAAET

SEQ ID NO: 2308 - protein, 22 aa, Homo sapiens
AIGPAVTGRNSGEYYYYYGMDV

SEQ ID NO: 2309 - DNA, 321 bp, Homo sapiens
gaaatagtgatgacccagtctccagccaccctgtctgtgtctccaggggaaagagccaccctctcttgcagggccagtcagagtgttaacagcaacttggcctggtaccagcagaagcctggccaggcccccaggctcctcatctatgctgtatccaccagggccactggtctcccagccaggttcagtggcagtgggtctgggacagaattcactctcaccatcagcagcctgcagtctgaagactttgtagtttattactgtcaccagtataataactggccgctcactttcggcggagggaccaaggtggagatcaaa

SEQ ID NO: 2310 - protein, 107 aa, Homo sapiens
EIVMTQSPATLSVSPGERATLSCRASQSVNSNLAWYQQKPGQAPRLLIYAVSTRATGLPARFSGSGSGTEFTLTISSLQSEDFVVYYCHQYNNWPLTFGGGTKVEIK

SEQ ID NO: 2311 - protein, 6 aa, Homo sapiens
QSVNSN

SEQ ID NO: 2312 - skipped

SEQ ID NO: 2313 - protein, 9 aa, Homo sapiens
HQYNNWPLT

SEQ ID NO: 2314 - DNA, 366 bp, Homo sapiens
caggtccaactggtacagtctggggctgaggtgaggaagcctggggcctcagtgaaggtctcctgcaaggtttccggatacaccctccctgaattagccatacactgggtgcgacaggcgcctggaaaagggcttgagtggatggggggttttattcctgaagatggtgacacaatctacgcacagaagttccagggcagagtcaccatgaccgaggacacatctacagacacagcctacatggacctgaccagcctgagatctgaggacgcggccgtgtattactgtacatcaggctgggcagcacctggatacaattacggaatggccgtctggggccaagggaccacggtcaccgtctcctca

SEQ ID NO: 2315 - protein, 122 aa, Homo sapiens
QVQLVQSGAEVRKPGASVKVSCKVSGYTLPELAIHWVRQAPGKGLEWMGGFIPEDGDTIYAQKFQGRVTMTEDTSTDTAYMDLTSLRSEDAAVYYCTSGWAAPGYNYGMAVWGQGTTVTVSS

SEQ ID NO: 2316 - protein, 8 aa, Homo sapiens
GYTLPELA

SEQ ID NO: 2317 - protein, 8 aa, Homo sapiens
FIPEDGDT

SEQ ID NO: 2318 - protein, 15 aa, Homo sapiens
TSGWAAPGYNYGMAV

SEQ ID NO: 2319 - DNA, 324 bp, Homo sapiens
gaagttgtgttgacgcagtctccaggcactttgtctttgtcttcaggggaaagagccaccctctcctgcagggccagtcagagtgttagcagtaactacttagcctggtaccagaagaaacctggccaggctcccaggctcctcatttatggtgcatccagcagggtcactggcatcccagacaggttcggtggcagtgggtctgggacagacttcactctcaccatcagcagactggagcctgaagattttgcagtgtattactgtcaacaatatgatgcctcaccgtacagttttggccaggggaccaagctggacatcaaa

SEQ ID NO: 2320 - protein, 108 aa, Homo sapiens
EVVLTQSPGTLSLSSGERATLSCRASQSVSSNYLAWYQKKPGQAPRLLIYGASSRVTGIPDRFGGSGSGTDFTLTISRLEPEDFAVYYCQQYDASPYSFGQGTKLDIK

SEQ ID NO: 2321 - protein, 7 aa, Homo sapiens
QSVSSNY

SEQ ID NO: 2322 - skipped

SEQ ID NO: 2323 - protein, 9 aa, Homo sapiens
QQYDASPYS

SEQ ID NO: 2324 - DNA, 366 bp, Homo sapiens
caggtccagttggtacagtctggggctgaggtgaagaagcctggggcctcagtgagggtctcctgcaaggtttccggatacaccctccctgaattagccatacactgggtgcgacaggctcctggaaaagggcttgagtggatgggaggttttgatcctgaggatggtgagacaatctacgcacagaagttccagggtagagtcatcatgaccgaggacacatccacagacacagcctacatggacctgagcagcctgagatctgaggacacggccgtgtattactgtgtaaaaacctgggcagcgcccggatataattacggtttggacacctggggccaagggaccacggtcaccgtctcctca

SEQ ID NO: 2325 - protein, 122 aa, Homo sapiens
QVQLVQSGAEVKKPGASVRVSCKVSGYTLPELAIHWVRQAPGKGLEWMGGFDPEDGETIYAQKFQGRVIMTEDTSTDTAYMDLSSLRSEDTAVYYCVKTWAAPGYNYGLDTWGQGTTVTVSS

SEQ ID NO: 2326 - protein, 8 aa, Homo sapiens
GYTLPELA

SEQ ID NO: 2327 - protein, 8 aa, Homo sapiens
FDPEDGET

SEQ ID NO: 2328 - protein, 15 aa, Homo sapiens
VKTWAAPGYNYGLDT

SEQ ID NO: 2329 - DNA, 324 bp, Homo sapiens
gaaattgtgttgacgcagtctccaggcatcctgtctttgtctccaggggaaagtgccaccctctcctgcagggccagtcagagtattgccagcaactacttagcctggttccagcagaaacctggccaggctcccaggctcctcatctatggtgcatccagcagggccgctggcttcccagacaggttcagtggcagtgggtctgggacagacttcactctcaccatcaagagactggagcctgaagattctgcagtgtattattgtcagcactatggtagctcaccgtgcagttttggccaggggaccaacctggagatcaaa

SEQ ID NO: 2330 - protein, 108 aa, Homo sapiens
EIVLTQSPGILSLSPGESATLSCRASQSIASNYLAWFQQKPGQAPRLLIYGASSRAAGFPDRFSGSGSGTDFTLTIKRLEPEDSAVYYCQHYGSSPCSFGQGTNLEIK

SEQ ID NO: 2331 - protein, 7 aa, Homo sapiens
QSIASNY

SEQ ID NO: 2332 - skipped

SEQ ID NO: 2333 - protein, 9 aa, Homo sapiens
QHYGSSPCS

SEQ ID NO: 2334 - DNA, 363 bp, Homo sapiens
caggtccagctggtacagtctgggactgaagtgaagaagcctggggcctcagtgaaggtctcctgcaaggtttccggatacaccctccctgaattggccattcactgggtgcgacaggctcctggaaaagggcttgagtggatgggaacttttgatcctgaagatggtgaaacaatctgcgcacagaagttccagggcagagtcaccatgaccgaggacacatctacagacacagcctacatggacctgagcagcctcagatctgaggacacggccgtttattactgtgcaacaacgtcgattatagcagctcggtggtggttcgacccctggggccagggaaccctggtcaccgtctcctca

SEQ ID NO: 2335 - protein, 121 aa, Homo sapiens
QVQLVQSGTEVKKPGASVKVSCKVSGYTLPELAIHWVRQAPGKGLEWMGTFDPEDGETICAQKFQGRVTMTEDTSTDTAYMDLSSLRSEDTAVYYCATTSIIAARWWFDPWGQGTLVTVSS

SEQ ID NO: 2336 - protein, 8 aa, Homo sapiens
GYTLPELA

SEQ ID NO: 2337 - protein, 8 aa, Homo sapiens
FDPEDGET

SEQ ID NO: 2338 - protein, 14 aa, Homo sapiens
ATTSIIAARWWFDP

SEQ ID NO: 2339 - DNA, 330 bp, Homo sapiens
caatctgccctgactcagcctccctccgcgtccgggtctcctggacagtcagtcaccatctcctgcactggaaccagcagtgacgttggtggttatgactatgtctcctggtaccaacaacacccaggcaaagcccccaaactcatgatttatgaggtcagtaagcggccctcaggggtccctgatcgcttctctggctccaagtctggcaacacggcctccctgaccgtctctgggctccaggctgaggatgaggctgattattactgcagttcatttgcaggcagcaacaatgtggttttcggcggaggggccaagctgaccgtcctg

SEQ ID NO: 2340 - protein, 110 aa, Homo sapiens
QSALTQPPSASGSPGQSVTISCTGTSSDVGGYDYVSWYQQHPGKAPKLMIYEVSKRPSGVPDRFSGSKSGNTASLTVSGLQAEDEADYYCSSFAGSNNVVFGGGAKLTVL

SEQ ID NO: 2341 - protein, 9 aa, Homo sapiens
SSDVGGYDY

SEQ ID NO: 2342 - skipped

SEQ ID NO: 2343 - protein, 10 aa, Homo sapiens
SSFAGSNNVV

SEQ ID NO: 2344 - DNA, 384 bp, Homo sapiens
caggtgcagctggtggagtctgggggaggcgtggtccagcctgggaggtccctgagactctcctgtgcagcgtctggattcaccttcagtagttatggcatgcactgggtccgccaggctccaggcaaggggctggagtgggtggcaattatttggtatgatggaagtaagaaatactatgcagactccgtgaagggccgattcaccatctccagagacaattccaagaacacgctgaatctgcaaatgaacagcctgagagccgaggacacggctgtgtattactgtgcgagagaagaggatatagtggcttcgggggggctctattacaacttcaacggtatggacgtctggggccaagggaccacggtcaccgtttcctca

SEQ ID NO: 2345 - protein, 128 aa, Homo sapiens
QVQLVESGGGVVQPGRSLRLSCAASGFTFSSYGMHWVRQAPGKGLEWVAIIWYDGSKKYYADSVKGRFTISRDNSKNTLNLQMNSLRAEDTAVYYCAREEDIVASGGLYYNFNGMDVWGQGTTVTVSS

SEQ ID NO: 2346 - protein, 8 aa, Homo sapiens
GFTFSSYG

SEQ ID NO: 2347 - protein, 8 aa, Homo sapiens
IWYDGSKK

SEQ ID NO: 2348 - protein, 21 aa, Homo sapiens
AREEDIVASGGLYYNFNGMDV

SEQ ID NO: 2349 - DNA, 318 bp, Homo sapiens
tcctatgagctgactcagccaccctcagtgtccgtgtccccaggacagacagccagcatcacctgctctggagataaattgggggataaatatgcttgctggtatcagcagaagccaggccagtcccctgtgctggtcatctatcaagatagcaagcggccctcagggatccctgagcgattctctggctccaactctgggaacacagccactctgaccatcaacgggacccaggctatggatgaggctgactatttctgtcaggcgtgggacagcaccactgtggtattcggcggagggaccaagctgaccgtccta

SEQ ID NO: 2350 - protein, 106 aa, Homo sapiens
SYELTQPPSVSVSPGQTASITCSGDKLGDKYACWYQQKPGQSPVLVIYQDSKRPSGIPERFSGSNSGNTATLTINGTQAMDEADYFCQAWDSTTVVFGGGTKLTVL

SEQ ID NO: 2351 - protein, 6 aa, Homo sapiens
KLGDKY

SEQ ID NO: 2352 - skipped

SEQ ID NO: 2353 - protein, 9 aa, Homo sapiens
QAWDSTTVV

SEQ ID NO: 2354 - DNA, 369 bp, Homo sapiens
caggtccagctggtacaatctggggctgaggtgaagaagcctggggcctcagtgaaggtctcctgcaaggtttccggatacaccctccctgaaatatccatacactgggtgcgacaggctcctggaaaagggcttgagtggatgggaggttttgatcctgaagatggtgaaacaatctacgcacagaagttccagggcagagtgatcatgaccgaggacacatctacagacacagcctatatggacctgagcagcctgagatctgaggacacggccgtgtatttctgtgcagctgccccggctatagcttcagcttcaaccttctggctcgacccctggggccagggaaccctggtcaccgtctccaca

SEQ ID NO: 2355 - protein, 123 aa, Homo sapiens
QVQLVQSGAEVKKPGASVKVSCKVSGYTLPEISIHWVRQAPGKGLEWMGGFDPEDGETIYAQKFQGRVIMTEDTSTDTAYMDLSSLRSEDTAVYFCAAAPAIASASTFWLDPWGQGTLVTVST

SEQ ID NO: 2356 - protein, 8 aa, Homo sapiens
GYTLPEIS

SEQ ID NO: 2357 - protein, 8 aa, Homo sapiens
FDPEDGET

SEQ ID NO: 2358 - protein, 16 aa, Homo sapiens
AAAPAIASASTFWLDP

SEQ ID NO: 2359 - DNA, 330 bp, Homo sapiens
cagtctgccctgactcagcctccctccgcgtccgggtctcctggacagtcagtcaccatctcctgcactggaaccagcagtgacgttggtggttataactatgtctcctggtaccaacagcacccaggcaaagcccccaaactcatgatttatgaggtcactaagcggccctcaggggtccctgatcgcttctctggctccaagtctgacaacacggcctccctgaccgtctctgggctccaggctgaggatgaggctgattattactgcagttcatatgcaggcagcaacaatttggtattcggcggagggaccaagctgaccgtccta

SEQ ID NO: 2360 - protein, 110 aa, Homo sapiens
QSALTQPPSASGSPGQSVTISCTGTSSDVGGYNYVSWYQQHPGKAPKLMIYEVTKRPSGVPDRFSGSKSDNTASLTVSGLQAEDEADYYCSSYAGSNNLVFGGGTKLTVL

SEQ ID NO: 2361 - protein, 9 aa, Homo sapiens
SSDVGGYNY

SEQ ID NO: 2362 - skipped

SEQ ID NO: 2363 - protein, 10 aa, Homo sapiens
SSYAGSNNLV

SEQ ID NO: 2364 - protein, 6 aa, Homo sapiens
NIGSKG

SEQ ID NO: 2365 - DNA, 354 bp, Homo sapiens
gaggtgcagctggtggagtctgggggaggcctggtcaagcctggggggtccctgagactctcctgtgcagcctctggattcaccttcagtagctatagcatgaactgggtccgccaggctccagggaaggggctggagtgggtctcgtccattagtactggtagtagttacatattctacgcagactcagtgaagggccgattcaccatctccagagacaacgccaagaactcactgtatctgcaaatgaacagcctgagagccgaggacacagctgtatattactgtgcgaaaactggggatcttcctttctttgactactggggccagggaaccctggtcaccgtctcctca

SEQ ID NO: 2366 - protein, 118 aa, Homo sapiens; identical to SEQ ID NO: 655

SEQ ID NO: 2367 - DNA, 330 bp, Homo sapiens
cagtctgccctgactcagcctgcctccgtgtctgggtctcctggacagtcgatcaccatctcctgcactggaaccagcagtgacgttggtcgttataactatgtctcctggtaccaacagcacccaggcaaagcccccaaactcatgatttatgaggtcagtaatcggccctcaggggtttctaatcgcttctctggctccaagtctggcaacacggcctccctgaccatctctgggctccaggctgaggacgaggctgattattactgcagctcatatacaagcagcagcactatggtattcggcggagggaccaagctgtccgtccta

SEQ ID NO: 2368 - protein, 110 aa, Homo sapiens
QSALTQPASVSGSPGQSITISCTGTSSDVGRYNYVSWYQQHPGKAPKLMIYEVSNRPSGVSNRFSGSKSGNTASLTISGLQAEDEADYYCSSYTSSSTMVFGGGTKLSVL

SEQ ID NO: 2369 - DNA, 360 bp, Homo sapiens
caggtgcagctgcagcagtcgggcccaggactgctgaagccttcggggaccctgtccctcacctgcgctgtctctggtggctccatcagaagtagtaactggtggatttgggtccgccagtccccagggaaggggctggagtggattggggaaatctatcatggtgggaacaccaattacaacccgtccctcaagagtcgagtcaccatatcagtcgacaagtccaagcaccagttctccctgaagctgacctctgtgaccgccgcggacacggccgtctattactgtgcgagagctctttacgatatcgggggagtttttgatctttggggccaagggactatggtcaccgtctcttca

SEQ ID NO: 2370 - protein, 120 aa, Homo sapiens
QVQLQQSGPGLLKPSGTLSLTCAVSGGSIRSSNWWIWVRQSPGKGLEWIGEIYHGGNTNYNPSLKSRVTISVDKSKHQFSLKLTSVTAADTAVYYCARALYDIGGVFDLWGQGTMVTVSS

1. A neutralising antibody that specifically binds to the receptor binding domain (RBD) of a SARS-CoV-2 spike protein, wherein the antibody competes for binding to the SARS-CoV-2 spike protein with a human ACE2 receptor.

2. The antibody according to claim 1, wherein the antibody comprises a variable heavy (VH) domain sequence comprising complementarity determining regions (CDRs) HCDR1, HCDR2 and HCDR3, and a variable light (VL) domain sequence comprising complementarity determining regions LCDR1, LCDR2 and LCDR3, and wherein HCDR3 is the HCDR3 of antibody IMPI-037 (SEQ ID NO: 182).

3. The antibody according to claim 2, wherein the HCDR1 is SEQ ID NO: 180, the HCDR2 is SEQ ID NO: 181, the HCDR3 is SEQ ID NO: 182, the LCDR1 is SEQ ID NO: 185, the LCDR2 is SEQ ID NO: 18, and the LCDR3 is SEQ ID NO: 186-.

4. The antibody according to claim 3, wherein the VH domain comprises SEQ ID NO: 179 and the VL domain comprises SEQ ID NO: 184, optionally wherein the VH domain sequence includes 1, 2, 3, 4 or 5 amino acid alterations outside the CDRs and optionally wherein the VL domain sequence includes 1, 2, 3, 4 or 5 amino acid alterations outside the CDRs; or wherein the VH domain comprises a sequence having at least 90% identity to SEQ ID NO: 179 and the VL domain comprises a sequence having at least 90% identity to SEQ ID NO: 184, and wherein the HCDR1 is SEQ ID NO: 180, the HCDR2 is SEQ ID NO: 181, the HCDR3 is SEQ ID NO: 182, the LCDR1 is SEQ ID NO: 185, the LCDR2 is SEQ ID NO: 18, and the LCDR3 is SEQ ID NO: 186.

5. (canceled)

6. The antibody according to claim 1, wherein the VH domain comprises SEQ ID NO: 179 and the VL domain comprises SEQ ID NO: 184.

7.-23. (canceled)

24. An antibody which (ij competes for binding to the SARS-CoV-2 spike protein with the antibody of claim 1 or (ii) binds to the same epitope on the SARS-CoV-2 spike protein as the antibody of claim 1.

25. (canceled)

26. The antibody according to claim 1, wherein:
(i) the antibody is a human IgG1 antibody, optionally wherein the antibody is a human IgG1 antibody comprising a constant region sequence of SEQ ID NO: 418;
(ii) the antibody is a human IgG4 antibody, optionally wherein the antibody is a human IgG4 antibody comprising a constant region sequence of SEQ ID NO: 436: or
(iii) the antibody comprises kappa (κ) light chain constant regions, preferably wherein the κ light chain constant regions sequence is SEO ID NO: 448.

27.-30. (canceled)

31. A nucleic acid comprising a sequence that encodes a VH domain and/or an VL domain of the antibody of claim 1.

32. A vector comprising the nucleic acid of claim 31, optionally wherein the vector is a CHO vector.

33. A host cell comprising the nucleic acid of claim 31.

34. A pharmaceutical composition comprising an antibody according to claim 1 and a pharmaceutically acceptable excipient.

35. (canceled)

36. The pharmaceutical composition according to claim 34, wherein:
the pharmaceutical composition is formulated for intravenous administration, intramuscular administration, or subcutaneous administration; and/or
the pharmaceutical composition further comprises at least one additional therapeutic agent, optionally wherein the at least one additional therapeutic agent is at least one additional antibody, optionally wherein the at least one additional antibody is selected from:
a. an antibody that specifically binds to the receptor binding domain (RBD) of the S1 subunit of the SARS-CoV-2 spike protein and competes for binding to the SARS-CoV-2 spike protein with the human ACE2 receptor;
b. an antibody that specifically binds to the receptor binding domain (RBD) of the S1 subunit of the SARS-CoV-2 spike protein and does not compete for binding to the SARS-CoV-2 spike protein with the human ACE2 receptor;
c. an antibody that specifically binds to the N-terminal domain (NTD) of the S1 subunit of the of SARS-CoV-2 spike protein;
d. an antibody that specifically binds to the S2 subunit of the of SARS-CoV-2 spike protein; and
e. an antibody that preferentially binds to the trimer form of the SARS-CoV-2 spike protein over the isolated RBD domain, S1 subunit and S2 subunit of the SARS-CoV-2 spike protein.

37.-39. (canceled)

40. A kit comprising the pharmaceutical composition of claim 34, optionally further comprising:
(i) at least one further therapeutic agent, optionally wherein the at least one further therapeutic agent is a further pharmaceutical composition comprising at least one additional antibody, optionally wherein the at least one additional antibody is selected from:
a. an antibody that specifically binds to the receptor binding domain (RBD) of the S1 subunit of the SARS-CoV-2 spike protein and competes for binding to the SARS-CoV-2 spike protein with the human ACE2 receptor;
b. an antibody that specifically binds to the receptor binding domain (RBD) of the S1 subunit of the SARS-CoV-2 spike protein and does not compete for binding to the SARS-CoV-2 spike protein with the human ACE2 receptor:
c. an antibody that specifically binds to the N-terminal domain (NTD) of the S1 subunit of the of SARS-CoV-2 spike protein;
d. an antibody that specifically binds to the S2 subunit of the of SARS-CoV-2 spike protein; and
e. an antibody that preferentially binds to the trimer form of the SARS-CoV-2 spike protein over the isolated RBD domain, S1 subunit and S2 subunit of the SARS-CoV-2 spike protein; and/or
(ii) a label or instructions for use to treat and/or prevent a SARS-CoV-2-related disease or condition, such as COVID-19: optionally wherein the label or instructions comprise a marketing authorisation number: optionally wherein the kit comprises an intravenous device or an injection device that comprises the antibody.

41.-49. (canceled)

50. A method of treating or preventing a SARS-CoV-2-related disease or condition in a human subject, wherein the method comprises administering to the human subject a therapeutically effective amount of an antibody according to claim 1.

51.-55. (canceled)

56. The method of claim 50, wherein:
(1) the SARS-CoV-2 related disease or condition is COVID-19; and/or
(2) the method further comprises administering at least one additional therapeutic agent, optionally wherein:
(i) administering the at least one additional therapeutic agent is simultaneous, separate or sequential to administering of the antibody;
(ii) the at least one additional therapeutic agent is at least one additional antibody, optionally wherein the at least one additional antibody is selected from:
a. an antibody that specifically binds to the receptor binding domain (RBD) of the S1 subunit of the SARS-CoV-2 spike protein and competes for binding to the SARS-CoV-2 spike protein with the human ACE2 receptor;
b. an antibody that specifically binds to the receptor binding domain (RBD) of the S1 subunit of the SARS-CoV-2 spike protein and does not compete for binding to the SARS-CoV-2 spike protein with the human ACE2 receptor;
c. an antibody that specifically binds to the N-terminal domain (NTD) of the S1 subunit of the of SARS-CoV-2 spike protein;
d. an antibody that specifically binds to the S2 subunit of the of SARS-CoV-2 spike protein; and
e. an antibody tha preferentially binds to the trimer form of the SARS-CoV-2 spike protein over the isolated RBD domain, S1 subunit and S2 subunit of the SARS-CoV-2 spike protein.

57. (canceled)

58. A method of determining the presence or absence of SARS-CoV-2, in a sample, the method comprising:
contacting the sample with the antibody of claim 1; and
testing for binding between the antibody and SARS-CoV-2 in the sample;
wherein detection of binding indicates the presence of SARS-CoV-2 in the sample and
wherein absence of binding indicates the absence of SARS-CoV-2 in the sample.

59. The method according to claim 58,
wherein:
(i) the antibody comprises or is conjugated to a detectable label;
(ii) the sample has been obtained from a human who has been or is suspected of having been infected with SARS-CoV-2 and/or who exhibits one or more symptoms of a SARS-CoV-2-related disease or condition, such as COVID-19; and/or
(iii) the sample is a serum sample, a plasma sample, a whole blood sample, an oral sample, a nasal swab sample, an urine sample, a faeces sample, a cerebrospinal fluid (CFS) sample, or a sample from any suspected SARS-CoV-2 infected organ or tissue.

60.-63. (canceled)

64. A diagnostic kit for use in a method of determining the presence or absence of SARS-CoV-2 comprising an antibody according to claim 1, and optionally one or more buffering solutions, optionally
(i) wherein the antibody comprises or is conjugated to a detectable label: or
(ii) comprising a first reagent comprising the antibody of claim 1 and a second reagent comprising a detector molecule that binds to the first reagent, optionally wherein the detector molecule is an antibody that comprises or is conjugated to a detectable label.

65.-72. (canceled)

73. A host cell comprising the vector of claim 32.

74. A pharmaceutical composition comprising an isolated nucleic acid encoding an antibody according to claim 1 and a pharmaceutically acceptable excipient.

75. A pharmaceutical composition comprising an isolated nucleic acid according to claim 31 and a pharmaceutically acceptable excipient.

76. A method of treating a disease in a subject, wherein the method comprises administering to the subject a therapeutically effective amount of an antibody according to claim 1.
